(19) United States
(12) Patent Application Publication
(10) Pub. No.: US 2026/0116972 A1
(43) Pub. Date: Apr. 30, 2026

(54) CROSS-SPECIES-SPECIFIC PSCAXCD3, CD19XCD3, C-METXCD3, ENDOSIALINXCD3, EPCAMXCD3, IGF-1RXCD3 OR FAPALPHAXCD3 BISPECIFIC SINGLE CHAIN ANTIBODY

(71) Applicant: AMGEN RESEARCH (MUNICH) GMBH, Munich (DE)

(72) Inventors: Peter Kufer, Munich (DE); Tobias Raum, Munich (DE); Roman Kischel, Munich (DE); Susanne Mangold, Munich (DE); Ralf Lutterbüse, Munich (DE); Patrick Hoffmann, Munich (DE); Doris Rau, Munich (DE); Matthias Klinger, Munich (DE); Claudia Blümel, Munich (DE)

(21) Appl. No.: 18/431,290

(22) Filed: Feb. 2, 2024

Related U.S. Application Data
(63) Continuation of application No. 16/728,609, filed on Dec. 27, 2019, now abandoned.
Application No. 16/728,609 is a continuation of application No. 13/122,242, now abandoned.
(60) Provisional application No. 61/101,933, filed on Oct. 1, 2008.
(60) Provisional application No. 61/101,850, filed on Oct. 1, 2008.
(60) Provisional application No. 61/101,921, filed on Oct. 1, 2008.
(60) Provisional application No. 61/101,927, filed on Oct. 1, 2008.
(60) Provisional application No. 61/101,844, filed on Oct. 1, 2008.
(60) Provisional application No. 61/101,853, filed on Oct. 1, 2008.

(51) Int. Cl. C07K 16/28; A61K 39/00; C07K 16/22; C07K 16/30; C07K 16/40

(52) U.S. Cl. CPC C07K 16/2809; C07K 16/22; C07K 16/2803; C07K 16/2851; C07K 16/2863; C07K 16/30; C07K 16/3069; C07K 16/40; A61K 2039/505; C07K 2317/31; C07K 2317/34

(57) ABSTRACT

The present invention relates to a bispecific single chain antibody molecule comprising a first binding domain capable of binding to an epitope of human and non-chimpanzee primate CD3 epsilon chain, wherein the epitope is part of an amino acid sequence comprised in the group consisting of SEQ ID NOs. 2, 4, 6, and 8, and a second binding domain capable of binding to an antigen selected from the group consisting of Prostate Stem Cell Antigen (PSCA), B-Lymphocyte antigen CD19 (CD19), hepatocyte growth factor receptor (C-MET), Endosialin, the EGF-like domain 1 of EpCAM, encoded by exon 2, Fibroblast activation protein alpha (FAP alpha) and Insulin-like growth factor I receptor (IGF-IR or IGF-1R). The invention also provides nucleic acids encoding said bispecific single chain antibody molecule as well as vectors and host cells and a process for its production. The invention further relates to pharmaceutical compositions comprising said bispecific single chain antibody molecule and medical uses of said bispecific single chain antibody molecule.

[0001] This application includes a sequence listing submitted electronically as 47397B_SeqListing.xml; Size: 3,391,488 bytes; Created: Feb. 1, 2024 and is incorporated herein by reference

[0002] The present invention relates to a bispecific single chain antibody molecule comprising a first binding domain capable of binding to an epitope of human and non-chimpanzee primate CD3 epsilon chain, wherein the epitope is part of an amino acid sequence comprised in the group consisting of SEQ ID NOs. 2, 4, 6, and 8, and a second binding domain capable of binding to an antigen selected from the group consisting of Prostate Stem Cell Antigen (PSCA), B-Lymphocyte antigen CD19 (CD19), hepatocyte growth factor receptor (C-MET), Endosialin, the EGF-like domain 1 of EpCAM, encoded by exon 2, Fibroblast activation protein alpha (FAP alpha) and Insulin-like growth factor I receptor (IGF-IR or IGF-1R). The invention also provides nucleic acids encoding said bispecific single chain antibody molecule as well as vectors and host cells and a process for its production. The invention further relates to pharmaceutical compositions comprising said bispecific single chain antibody molecule and medical uses of said bispecific single chain antibody molecule.

[0003] T cell recognition is mediated by clonotypically distributed alpha beta and gamma delta T cell receptors (TcR) that interact with the peptide-loaded molecules of the peptide MHC (pMHC) (Davis & Bjorkman, Nature 334 (1988), 395-402). The antigen-specific chains of the TcR do not possess signalling domains but instead are coupled to the conserved multisubunit signalling apparatus CD3 (Call, Cell 111 (2002), 967-979, Alarcon, Immunol. Rev. 191 (2003), 38-46, Malissen Immunol. Rev. 191 (2003), 7-27). The mechanism by which TcR ligation is directly communicated to the signalling apparatus remains a fundamental question in T cell biology (Alarcon, loc. cit.; Davis, Cell 110 (2002), 285-287). It seems clear that sustained T cell responses involve coreceptor engagement, TcR oligomerization, and a higher order arrangement of TcR-pMHC complexes in the immunological synapse (Davis & van der Merwe, Curr. Biol. 11 (2001), R289-R291, Davis, Nat. Immunol. 4 (2003), 217-224). However very early TcR signalling occurs in the absence of these events and may involve a ligand-induced conformational change in CD3 epsilon (Alarcon, loc. cit., Davis (2002), loc. cit., Gil, J. Biol. Chem. 276 (2001), 11174-11179, Gil, Cell 109 (2002), 901-912). The epsilon, gamma, delta and zeta subunits of the signalling complex associate with each other to form a CD3 epsilon-gamma heterodimer, a CD3 epsilon-delta Qheterodimer, and a CD3 zeta-zeta homodimer (Call, loc. cit.). Various studies have revealed that the CD3 molecules are important for the proper cell surface expression of the alpha beta TcR and normal T cell development (Berkhout, J. Biol. Chem. 263 (1988), 8528-8536, Wang, J. Exp. Med. 188 (1998), 1375-1380, Kappes, Curr. Opin. Immunol. 7 (1995), 441-447). The solution structure of the ectodomain fragments of the mouse CD3 epsilon gamma heterodimer showed that the epsilon gamma subunits are both C2-set Ig domains that interact with each other to form an unusual side-to-side dimer configuration (Sun, Cell 105 (2001), 913-923). Although the cysteine-rich stalk appears to play an important role in driving CD3 dimerization (Su, loc. cit., Borroto, J. Biol. Chem. 273 (1998), 12807-12816), interaction by means of the extracellular domains of CD3 epsilon and CD3 gamma is sufficient for assembly of these proteins with TcR beta (Manolios, Eur. J. Immunol. 24 (1994), 84-92, Manolios & Li, Immunol. Cell Biol. 73 (1995), 532-536). Although still controversial, the dominant stoichiometry of the TcR most likely comprises one alpha beta TcR, one CD3 epsilon gamma heterodimer, one CD3 epsilon delta heterodimer and one CD3 zeta zeta homodimer (Call, loc. cit.). Given the central role of the human CD3 epsilon gamma heterodimer in the immune response, the crystal structure of this complex bound to the therapeutic antibody OKT3 has recently been elucidated (Kjer-Nielsen, PNAS 101, (2004), 7675-7680).

[0004] A number of therapeutic strategies modulate T cell immunity by targeting TcR signalling, particularly the anti-human CD3 monoclonal antibodies (mAbs) that are widely used clinically in immunosuppressive regimes. The CD3-specific mouse mAb OKT3 was the first mAb licensed for use in humans (Sgro, Toxicology 105 (1995), 23-29) and is widely used clinically as an immunosuppressive agent in transplantation (Chatenoud, Clin. Transplant 7 (1993), 422-430, Chatenoud, Nat. Rev. Immunol. 3 (2003), 123-132, Kumar, Transplant. Proc. 30 (1998), 1351-1352), type 1 diabetes (Chatenoud (2003), loc. cit.), and psoriasis (Utset, J. Rheumatol. 29 (2002), 1907-1913). Moreover, anti-CD3 mAbs can induce partial T cell signalling and clonal anergy (Smith, J. Exp. Med. 185 (1997), 1413-1422). OKT3 has been described in the literature as a potent T cell mitogen (Van Wauve, J. Immunol. 124 (1980), 2708-18) as well as a potent T cell killer (Wong, Transplantation 50 (1990), 683-9). OKT3 exhibits both of these activities in a time-dependent fashion; following early activation of T cells leading to cytokine release, upon further administration OKT3 later blocks all known T cell functions. It is due to this later blocking of T cell function that OKT3 has found such wide application as an immunosuppressant in therapy regimens for reduction or even abolition of allograft tissue rejection.

[0005] OKT3 reverses allograft tissue rejection most probably by blocking the function of all T cells, which play a major role in acute rejection. OKT3 reacts with and blocks the function of the CD3 complex in the membrane of human T cells, which is associated with the antigen recognition structure of T cells (TCR) and is essential for signal transduction. Which subunit of the TCR/CD3 is bound by OKT3 has been the subject of multiple studies. Though some evidence has pointed to a specificity of OKT3 for the epsilon-subunit of the TCR/CD3 complex (Tunnacliffe, Int. Immunol. 1 (1989), 546-50; Kjer-Nielsen, PNAS 101, (2004), 7675-7680). Further evidence has shown that OKT3 binding of the TCR/CD3 complex requires other subunits of this complex to be present (Salmeron, J. Immunol. 147 (1991), 3047-52).

[0006] Other well known antibodies specific for the CD3 molecule are listed in Tunnacliffe, Int. Immunol. 1 (1989), 546-50. As indicated above, such CD3 specific antibodies are able to induce various T cell responses such as lymphokine production (Von Wussow, J. Immunol. 127 (1981), 1197; Palacious, J. Immunol. 128 (1982), 337), proliferation (Van Wauve, J. Immunol. 124 (1980), 2708-18) and suppressor-T cell induction (Kunicka, in “Lymphocyte Typing II” 1 (1986), 223). That is, depending on the experimental conditions, CD3 specific monoclonal antibody can either inhibit or induce cytotoxicity (Leewenberg, J. Immunol. 134 (1985), 3770; Phillips, J. Immunol. 136 (1986) 1579; Platsoucas, Proc. Natl. Acad. Sci. USA 78 (1981), 4500; Itoh, Cell. Immunol. 108 (1987), 283-96; Mentzer, J. Immunol. 135 (1985), 34; Landegren, J. Exp. Med. 155 (1982), 1579; Choi (2001), Eur. J. Immunol. 31, 94-106; Xu (2000), Cell Immunol. 200, 16-26; Kimball (1995), Transpl. Immunol. 3, 212-221).

[0007] Although many of the CD3 antibodies described in the art have been reported to recognize the CD3 epsilon subunit of the CD3 complex, most of them bind in fact to conformational epitopes and, thus, only recognize CD3 epsilon in the native context of the TCR. Conformational epitopes are characterized by the presence of two or more discrete amino acid residues which are separated in the primary sequence, but come together on the surface of the molecule when the polypeptide folds into the native protein/antigen (Sela, (1969) Science 166, 1365 and Laver, (1990) Cell 61, 553-6). The conformational epitopes bound by CD3 epsilon antibodies described in the art may be separated in two groups. In the major group, said epitopes are being formed by two CD3 subunits, e.g. of the CD3 epsilon chain and the CD3 gamma or CD3 delta chain. For example, it has been found in several studies that the most widely used CD3 epsilon monoclonal antibodies OKT3, WT31, UCHT1, 7D6 and Leu4 did not bind to cells singly transfected with the CD3-epsilon chain. However, these antibodies stained cells doubly transfected with a combination of CD3 epsilon plus either CD3 gamma or CD3 delta (Tunnacliffe, loc. cit.; Law, Int. Immunol. 14 (2002), 389-400; Salmeron, J. Immunol. 147 (1991), 3047-52; Coulie, Eur. J. Immunol. 21 (1991), 1703-9). In a second smaller group, the conformational epitope is being formed within the CD3 epsilon subunit itself. A member of this group is for instance mAb APA 1/1 which has been raised against denatured CD3 epsilon (Risueno, Blood 106 (2005), 601-8). Taken together, most of the CD3 epsilon antibodies described in the art recognize conformational epitopes located on two or more subunits of CD3. The discrete amino acid residues forming the three-dimensional structure of these epitopes may hereby be located either on the CD3 epsilon subunit itself or on the CD3 epsilon subunit and other CD3 subunits such as CD3 gamma or CD3 delta.

[0008] Another problem with respect to CD3 antibodies is that many CD3 antibodies have been found to be species-specific. Anti-CD3 monoclonal antibodies—as holds true generally for any other monoclonal antibodies—function by way of highly specific recognition of their target molecules. They recognize only a single site, or epitope, on their target CD3 molecule. For example, one of the most widely used and best characterized monoclonal antibodies specific for the CD3 complex is OKT-3. This antibody reacts with chimpanzee CD3 but not with the CD3 homolog of other primates, such as macaques, or with dog CD3 (Sandusky et al., J. Med. Primatol. 15 (1986), 441-451). Similarly, WO2005/118635 or WO2007/033230 describe human monoclonal CD3 epsilon antibodies which react with human CD3 epsilon but not with CD3 epsilon of mouse, rat, rabbit, or non-chimpanzee primates, such as rhesus monkey, cynomolgus monkey or baboon monkey. The anti-CD3 monoclonal antibody UCHT-1 is also reactive with CD3 from chimpanzee but not with CD3 from macaques (own data). On the other hand, there are also examples of monoclonal antibodies, which recognize macaque antigens, but not their human counterparts. One example of this group is monoclonal antibody FN-18 directed to CD3 from macaques (Uda et al., J. Med. Primatol. 30 (2001), 141-147). Interestingly, it has been found that peripheral lymphocytes from about 12% of cynomolgus monkeys lacked reactivity with anti-rhesus monkey CD3 monoclonal antibody (FN-18) due to a polymorphism of the CD3 antigen in macaques. Uda et al. described a substitution of two amino acids in the CD3 sequence of cynomolgus monkeys, which are not reactive with FN-18 antibodies, as compared to CD3 derived from animals, which are reactive with FN-18 antibodies (Uda et al., J Med Primatol. 32 (2003), 105-10; Uda et al., J Med Primatol. 33 (2004), 34-7).

[0009] The discriminatory ability, i.e. the species specificity, inherent not only to CD3 monoclonal antibodies (and fragments thereof), but to monoclonal antibodies in general, is a significant impediment to their development as therapeutic agents for the treatment of human diseases. In order to obtain market approval any new candidate medication must pass through rigorous testing. This testing can be subdivided into preclinical and clinical phases: Whereas the latter—further subdivided into the generally known clinical phases I, II and III—is performed in human patients, the former is performed in animals. The aim of pre-clinical testing is to prove that the drug candidate has the desired activity and most importantly is safe. Only when the safety in animals and possible effectiveness of the drug candidate has been established in preclinical testing this drug candidate will be approved for clinical testing in humans by the respective regulatory authority. Drug candidates can be tested for safety in animals in the following three ways, (i) in a relevant species, i.e. a species where the drug candidates can recognize the ortholog antigens, (ii) in a transgenic animal containing the human antigens and (iii) by use of a surrogate for the drug candidate that can bind the ortholog antigens present in the animal. Limitations of transgenic animals are that this technology is typically limited to rodents. Between rodents and man there are significant differences in the physiology and the safety results cannot be easily extrapolated to humans. The limitations of a surrogate for the drug candidate are the different composition of matter compared to the actual drug candidate and often the animals used are rodents with the limitation as discussed above. Therefore, preclinical data generated in rodents are of limited predictive power with respect to the drug candidate. The approach of choice for safety testing is the use of a relevant species, preferably a lower primate. The limitation now of monoclonal antibodies suitable for therapeutic intervention in man described in the art is that the relevant species are higher primates, in particular chimpanzees. Chimpanzees are considered as endangered species and due to their human-like nature, the use of such animals for drug safety testing has been banned in Europe and is highly restricted elsewhere. CD3 has also been successfully used as a target for bispecific single chain antibodies in order to redirect cytotoxic T cells to pathological cells, resulting in the depletion of the diseased cells from the respective organism (WO 99/54440; WO 04/106380). For example, Bargou et al. (Science 321 (2008): 974-7) have recently reported on the clinical activity of a CD19×CD3 bispecific antibody construct called blinatumomab, which has the potential to engage all cytotoxic T cells in human patients for lysis of cancer cells. Doses as low as 0.005 milligrams per square meter per day in non-Hodgkin's lymphoma patients led to an elimination of target cells in blood. Partial and complete tumor regressions were first observed at a dose level of 0.015 milligrams, and all seven patients treated at a dose level of 0.06 milligrams experienced a tumor regression. Blinatumomab also led to clearance of tumor cells from bone marrow and liver. Though this study established clincical proof of concept for the therapeutic potency of the bispecific single chain antibody format in treating blood-cell derived cancer, there is still need for successful concepts for therapies of other cancer types.

[0010] In 2008, an estimated 186,320 men will be newly diagnosed with prostate cancer in the United States and about 28,660 men will die from the disease. The most recent report available on cancer mortality shows that, in 2004, the overall death rate from prostate cancer among American men was 25 per 100,000. In the late 1980s, the widespread adoption of the prostate-specific antigen (PSA) test represented a major improvement in the management of prostate cancer. This test measures the amount of PSA protein in the blood, which is often elevated in patients with prostate cancer. In 1986, the U.S. Food and Drug Administration approved the use of the PSA test to monitor patients with prostate cancer and, in 1994, additionally approved its use as a screening test for this disease. Due to the widespread implementation of PSA testing in the United States, approximately 90 percent of all prostate cancers are currently diagnosed at an early stage, and, consequently, men are surviving longer after diagnosis. However, the results of two ongoing clinical trials, the NCI-sponsored Prostate, Lung, Colorectal, and Ovarian (PLCO) screening trial and the European Study of Screening for Prostate Cancer (ERSPC) will be needed to determine whether PSA screening actually saves lives. Ongoing clinical trials over the past 25 years have investigated the effectiveness of natural and synthetic compounds in the prevention of prostate cancer. For example, the Prostate Cancer Prevention Trial (PCPT), which enrolled nearly 19,000 healthy men, found that finasteride, a drug approved for the treatment of benign prostatic hyperplasia (BPH), which is a noncancerous enlargement of the prostate, reduced the risk of developing prostate cancer by 25 percent. Another trial, the Selenium and Vitamin E Cancer Prevention Trial (SELECT), is studying more than 35,000 men to determine whether daily supplements of selenium and vitamin E can reduce the incidence of prostate cancer in healthy men. Other prostate cancer prevention trials are currently evaluating the protective potential of multivitamins, vitamins C and D, soy, green tea, and lycopene, which is a natural compound found in tomatoes. One study, reported in 2005, showed that specific genes were fused in 60 to 80 percent of the prostate tumors analyzed. This study represents the first observation of non-random gene rearrangements in prostate cancer. This genetic alteration may eventually be used as a biomarker to aid in the diagnosis and, possibly, treatment of this disease. Other studies have shown that genetic variations in a specific region of chromosome 8 can increase a man's risk of developing prostate cancer. These genetic variations account for approximately 25 percent of the prostate cancers that occur in white men. They are the first validated genetic variants that increase the risk of developing prostate cancer and may help scientists better understand the genetic causes of this disease. There is also ongoing research that examines how proteins circulating in a patient's blood can be used to improve the diagnosis of prostate and other cancers. In 2005, scientists identified a group of specific proteins that are produced by a patient's immune system in response to prostate tumors. These proteins, a type of autoantibody, were able to detect the presence of prostate cancer cells in blood specimens with greater than 90 percent accuracy. When used in combination with PSA, these and other blood proteins may eventually be used to reduce the number of false-positive results obtained with PSA testing alone and, therefore, reduce the large number of unnecessary prostate biopsies that are performed each year due to false-positive PSA test results.

[0011] Apart from PSA, several other markers for prostate cancer have been identified, including e.g. the six-transmembrane epithelial antigen of the prostate (STEAP) (Hubert et al., PNAS 96 (1999), 14523-14528), the prostate-specific membrane antigen (PSM/PSMA) (Israeli et al., Cancer Res. 53 (1993), 227-230) and the Prostate stem cell antigen (PSCA) (Reiter et al., Proc. Nat. Acad. Sci. 95: 1735-1740, 1998). Prostate stem cell antigen (PSCA) is a 123 amino acid protein first identifed when looking for genes upregulated during cancer progression in the LAPC-4 prostate xenograft model (Reiter et al., loc. cit.). It is a glycosyl phosphatidylinositol-anchored cell-surface protein that belongs to the family of Thy-1/Ly-6 surface antigens. PSCA bears 30% homology to stem cell antigen type 2. Although the function of PSCA is yet to be elucidated, homologues of PSCA have diverse activities, and have themselves been implicated in carcinogenesis. Stem cell antigen type 2 has been shown to prevent apoptosis in immature thymocytes (Classon and Coverdale, PNAS 91 (1994), 5296-5300). Thy-1 activates T cells by signalling through src tyrosine kinases (Amoui et al., Eur. J. Immunol. 27 (1997), 1881-86). Ly-6 genes have been implicated in tumorigenesis and cell adhesion (Schrijvers et al., Exp. Cell. Res. 196 (1991), 264-69). Initial messenger RNA studies and subsequent monoclonal antibody (mAb) staining have revealed that PSCA is expressed on the cell surface of normal and malignant prostate cells (Reiter et al., loc. cit.; Gu et al., Oncogene 19 (2000), 1288-96; Ross et al., Cancer Res. 62 (2002), 2546-53). In normal prostate, PSCA mRNA has been detected in a subset of basal and secretory cells. In prostate carcinoma, PSCA mRNA expression has been detected in approximately 50-80% of primary and approximately 70% of metastatic cancers (Reiter et al., loc. cit.). Immunohistochemistry has been reported on 112 primary prostate cancers and nine prostate cancers metastatic to bone (Gu et al., loc. cit.). PSCA expression was detected in 94% and overexpressed in 40% of clinically localized prostate cancers. High levels of PSCA protein expression were also detected in nine out of nine prostate cancer bone metastases examined. Outside the prostate, PSCA is detected in the umbrella cell layer of the transitional epithelium, some renal collecting ducts, neuroendocrine cells of the stomach, and placental trophoblasts. Importantly, recent studies have reported an overexpression of PSCA in a large proportion of pancreatic cancers and invasive and non-invasive transitional cell carcinomas (Amara et al., Cancer Res. 61 (2001), 4660-4665; Argani et al., Cancer Res. 61 (2001), 4320-24). Because of its cell surface expression and its overexpression in a substantial proportion of various cancers, PSCA has been discussed as target for treatment strategies in cancer. However, future clinical correlation will be required to validate this possibility.

[0012] The expression of certain CD antigens is highly restricted to specific lineage lymphohematopoietic cells and over the past several years, antibodies directed against lymphoid-specific antigens have been used to develop treatments that were effective either in vitro or in animal models. In this respect CD19 has proved to be a very useful target. CD19 is expressed in the whole B lineage from the pro B cell to the mature B cell, it is not shed, is uniformly expressed on all lymphoma cells, and is absent from stem cells (Haagen, Clin Exp Immunol 90 (1992), 368-75, 14; Uckun, Proc. Natl. Acad. Sci. USA 85 (1988), 8603-7). The CD19 is involved in the development of certain B-cell mediated diseases such as various forms of non-Hodgkin lymphoma, B-cell mediated autoimmune diseases or the depletion of B-cells.

[0013] A further example for a molecule which is involved in the progression and spread of numerous human cancer types is the hepatocyte growth factor receptor MET (C-MET). The MET oncogene, encoding the receptor tyrosin kinase (RTK) for hepatocyte growth factor (HGF) and Scatter Factor (SF), controls genetic programs leading to cell growth, invasion, and protection from apoptosis. Deregulated activation of MET is critical not only for the acquisition of tumorigenic properties but also for the achievement of the invasive phenotype (Trusolino, L. & Comoglio, P. M. (2002) Nat. Rev. Cancer 2, 289-300). The role of MET in human tumors emerged from several experimental approaches and was unequivocally proven by the discovery of MET-activating mutations in inherited forms of carcinomas (Schmidt et al., Nat. Genet. 16 (1997), 68-73; Kim et al., J. Med. Genet. 40 (2003), e97). MET constitutive activation is frequent in sporadic cancers, and several studies have shown that the MET oncogene is overexpressed in tumors of specific histotypes or is activated through autocrine mechanisms (for a list see http://www.vai.org/met/). Besides, the MET gene is amplified in hematogenous metastases of colorectal carcinomas (Di Renzo et al., Clin. Cancer Res. 1 (1995), 147-154).

[0014] The Scatter Factor (SF) secreted in culture by fibroblasts, that has the ability to induce intercellular dissociation of epithelial cells, and the Hepatocyte Growth Factor (HGF), a potent mitogen for hepatocytes in culture derived from platelets or from blood of patients with acute liver failure, independently identified as Met ligands turned out to be the same molecule. Met and SF/HGF are widely expressed in a variety of tissues. The expression of Met (the receptor) is normally confined to cells of epithelial origin, while the expression of SF/HGF (the ligand) is restricted to cells of mesenchymal origin.

[0015] Met is a transmembrane protein produced as a single-chain precursor. The precursor is proteolytically cleaved at a furin site to produce a highly glycosylated and entirely extracellular α-subunit of 50 kd and a β-subunit of 145 kd with a large extracellular region (involved in binding the ligand), a membrane spanning segment, and an intracellular region (containing the catalytic activity) (Giordano (1989) 339: 155-156). The α and β chains are disulphide linked. The extracellular portion of Met contains a region of homology to semaphorins (Sema domain, which includes the full α chain and the N-terminal part of the β chain of Met), a cysteine-rich Met Related Sequence (MRS) followed by glycineproline-rich (G-P) repeats, and four Immunoglobuline-like structures (Birchmeier et al., Nature Rev. 4 (2003), 915-25). The intracellular region of Met contains three regions: (1) a juxtamembrane segment that contains: (a) a serine residue (Ser 985) that, when phosphorylated by protein kinase C or by Ca²⁺calmodulin-dependent kinases downregulates the receptor kinase activity Gandino et al., J. Biol. Chem. 269 (1994), 1815-20); and (b) a tyrosine (Tyr 1003) that binds the ubiquitin ligase Cbl responsible for Met polyubiquitination, endocytosis and degradation (Peschard et al., Mol. Cell 8 (2001), 995-1004); (2) the tyrosine kinase domain that, upon receptor activation, undergoes transphosphorylation on Tyr1234 and Tyr1235; (3) the C-terminal region, which comprises two crucial tyrosines (Tyr1349 and Tyr1356) inserted in a degenerate motif that represents a multisubstrate docking site capable of recruiting several downstream adaptors containing Src homology-2 (SH2) domains Met receptor, as most Receptor Tyrosine Kinases (RTKs) use different tyrosines to bind specific signaling molecules. The two tyrosines of the docking sites have been demonstrated to be necessary and sufficient for the signal transduction both in vitro and in vivo (Maina et al., Cell 87 (1996), 531-542; Ponzetto et al., Cell 77 (1994), 261-71).

[0016] Though potent and selective preclinical drug candidates have been developed using C-MET as a tumor target, follow-up clinical trials have to reveal whether these drugs are indeed safe and show therapeutic efficacy in humans. In light of these uncertainties, there is still need for novel therapeutic concepts for cancer.

[0017] Cancer has surpassed heart disease as the top killer of Americans under 85, in 2005. Today, cancer ranks behind cardiovascular diseases as the second leading cause of death in Germany. Unless dramatic breakthroughs are achieved in cancer prevention in the next few years comparable to those achieved for cardiovascular disease, cancer will become the leading cause of death in Germany within 15-20 years. Inhibition of tumor angiogenesis is one of the anticancer strategies which has generated much excitement among clinicians and cancer research scientists in the last few years. In the course of these research efforts, several tumor endothelial markers have been identified. Tumor endothelial markers (TEMs) like Endosialin (=TEM1 or CD248) are overexpressed during tumor angiogenesis (St. Croix et al., Science 289 (2000), 1197-1202). Despite the fact that their functions have not been characterized in detail so far, it is well established that they are strongly expressed on vascular endothelial cells in developing embryos and tumors studies (Carson-Walter et al., Cancer Res. 61: 6649-6655, 2001). Accordingly, Endosialin, a 165-kDa type I transmembrane protein, is expressed on the cell surface of tumor blood vessel endothelium in a broad range of human cancers but not detected in blood vessels or other cell types in many normal tissues. It is a C-type lectin-like molecule of 757 amino acids composed of a signal leader peptide, five globular extracellular domains (including a C-type lectin domain, one domain with similarity to the Sushi/ccp/scr pattern, and three EGF repeats), followed by a mucin like region, a transmembrane segment, and a short cytoplasmic tail (Christian et al., J. Biol. Chem. 276: 7408-7414, 2001). The Endosialin core protein carries abundantly sialylated, O-linked oligosaccharides and is sensitive to O-sialoglycoprotein endopeptidase, placing it in the group of sialomucin-like molecules. The N-terminal 360 amino acids of Endosialin show homology to thrombomodulin, a receptor involved in regulating blood coagulation, and to complement receptor C1qRp. This structural relationship indicates a function for Endosialin as a tumor endothelial receptor. Although Endosialin mRNA is ubiquitously expressed on endothelial cells in normal human and murine somatic tissues, Endosialin protein is largely restricted to the corpus luteum and highly angiogenic tissues such as the granular tissue of healing wounds or tumors (Opavsky et al., J. Biol. Chem. 276 (2001, 38795-38807; Rettig et al., PNAS 89 (1992), 10832-36). Endosialin protein expression is upregulated on tumor endothelial cells of carcinomas (breast, kidney, lung, colorectal, colon, pancreas mesothelioma), sarcomas, and neuroectodermal tumors (melanoma, glioma, neuroblastoma) (Rettig et al., loc. cit.). In addition, Endosialin is expressed at a low level on a subset of tumor stroma fibroblasts (Brady et al., J. Neuropathol. Exp. Neurol. 63 (2004), 1274-83; Opavsky et al., loc. cit.). Because of its restricted normal tissue distribution and abundant expression on tumor endothelial cells of many different types of solid tumors, Endosialin has been discussed as a target for antibody-based antiangiogenic treatment strategies of cancer. However, so far, there are no effective therapeutic approaches using Endosialin as a tumor endothelial target.

[0018] A molecule which is very frequently and highly expressed on the majority of human adenocarcinoma and several squamous cell carcinoma cells is EpCAM (CD326) (Went et al., Br. J. Cancer 94 (20006), 128-135). Recent studies have shown that EpCAM is a signalling molecule that can upregulate nuclear expression of the proto-oncogene c-Myc and cyclins (Munz et al., Oncogene 23 (2004), 5748-58). When overexpressed in quiescent cells, EpCAM induces cell proliferation, growth factor independence and growth of colonies in soft agar, which are hallmarks of oncogenic proteins. When EpCAM expression is knocked down by small interfering RNA (siRNA) in breast cancer cells, such cells cease to proliferate, migrate and be invasive (Osta et al., Cancer Res. 64 (2004), 5818-24). This oncogenic signalling of EpCAM may explain why EpCAM overexpression correlates with poor overall survival in a number of human malignancies, including breast and ovarian cancer (Spizzo et al., Gynecol. Oncol. 103 (2006), 483-8). EpCAM has already been employed as a target antigen in several antibody-based therapeutic approaches, including a human antibody (Oberneder et al., Eur. J. Cancer 42 (2006), 2530-8) and an EpCAM×CD3 single chain bispecific antibody called MT110. The characteristics of MT110 have recently been desribed in detail (Brischwein et al., 43 (2006), 1129-43). This antibody is active against a variety of human carcinoma lines expressing the target antigen and is currently being tested in a phase I study for safety and early signs of efficacy.

[0019] More specifically, cancer has surpassed heart disease as the top killer of Americans under 85 in 2005. Today, cancer ranks behind cardiovascular diseases as the second leading cause of death in Germany. Unless dramatic breakthroughs are achieved in cancer prevention in the next few years comparable to those achieved for cardiovascular disease, cancer will become the leading cause of death in Germany within 15-20 years. Among the more than 100 types of different cancers, epithelial cancer is the leading cause of cancer deaths in Germany. In epithelial cancer, invasion and metastasis of malignant epithelial cells into normal tissues is accompanied by adaptive changes in the mesenchyme-derived supporting stroma of the target organs. Altered gene expression in these non-transformed stromal cells has been discussed to provide potential targets for therapy. The cell surface protease fibroblast activation protein alpha (FAP alpha) is one example for such a target of activated tumor fibroblasts. Fibroblast activation protein alpha is an inducible cell surface glycoprotein that has originally been identified in cultured fibroblasts using monoclonal antibody F19. Immunohistochemical studies have shown that FAP alpha is transiently expressed in certain normal fetal mesenchymal tissues but that normal adult tissues as well as malignant epithelial, neural, and hematopoietic cells are generally FAP alpha-negative. However, most of the common types of epithelial cancers contain abundant FAP alpha-reactive stromal fibroblasts. Scanlan et al. (Proc. Nat. Acad. Sci. 91: 5657-5661, 1994) cloned a FAP alpha cDNA from a WI-38 human fibroblast cDNA expression library by immunoselection using antibody F19. The predicted 760-amino acid human FAP alpha protein is a type II integral membrane protein with a large C-terminal extracellular domain, which contains 6 potential N-glycosylation sites, 13 cysteine residues, and 3 segments that correspond to highly conserved catalytic domains of serine proteases; a hydrophobic transmembrane segment; and a short cytoplasmic tail. FAP-alpha shows 48% amino acid identity with dipeptidyl peptidase IV (DPP4) and 30% identity with DPP4-related protein (DPPX). Northern blot analysis detected a 2.8-kb FAP alpha mRNA in fibroblasts. Seprase is a 170-kD integral membrane gelatinase whose expression correlates with the invasiveness of human melanoma and carcinoma cells. Goldstein et al. (Biochim. Biophys. Acta 1361: 11-19, 1997) cloned and characterized the corresponding seprase cDNA. The authors found that seprase and FAP alpha are the same protein and products of the same gene. Pineiro-Sanchez et al. (J. Biol. Chem. 272: 7595-7601, 1997) isolated seprase/FAP alpha protein from the cell membranes and shed vesicles of human melanoma LOX cells. Serine protease inhibitors blocked the gelatinase activity of seprase/FAP alpha, suggesting that seprase/FAP alpha contains a catalytically active serine residue(s). The authors found that seprase/FAP alpha is composed of monomeric, N-glycosylated 97-kD subunits that are proteolytically inactive. They concluded that seprase/FAP alpha is similar to DPP4 in that their proteolytic activities are dependent upon subunit association. Due to its degrading activity of gelatine and heat-denatured type-I and type-IV collagen, a role for seprase/FAP alpha in extracellular matrix remodeling, tumor growth, and metastasis of cancers has been suggested. Moreover, seprase/FAP alpha shows a restricted expression pattern in normal tissues and a uniform expression in the supporting stroma of many malignant tumors. Therefore, seprase/FAP alpha may be used as a target for exploring the concept of tumor stroma targeting for immunotherapy of human epithelial cancer. However, though several clinical trials have been initiated to investigate seprase's/FAP alpha's role as a tumor antigen target, conventional immunotherapy approaches or inhibition of seprase/FAP alpha enzymatic activity so far did not yet result in therapeutic efficacy (see e.g. Welt et al., J. Clin. Oncol. 12:1193-203, 1994; Narra et al., Cancer Biol. Ther. 6, 1691-9, 2007; Henry et al., Clinical Cancer Research 13, 1736-1741, 2007).

[0020] Insulin-like growth factor I receptor (IGF-IR or IGF-1R) is a receptor with tyrosine kinase activity having 70% homology with the insulin receptor IR. IGF-1R is a glycoprotein of molecular weight approximately 350,000. It is a hetero-tetrameric receptor of which each half-linked by disulfide bridges-is composed of an extracellular a-subunit and of a transmembrane [beta]-subunit. IGF-1R binds IGF 1 and IGF 2 with a very high affinity but is equally capable of binding to insulin with an affinity 100 to 1000 times less. Conversely, the 11R binds insulin with a very high affinity although the ICFs only bind to the insulin receptor with a 100 times lower affinity. The tyrosine kinase domain of IGF-1R and of 1R has a very high sequence homology although the zones of weaker homology respectively concern the cysteine-rich region situated on the alpha-subunit and the C-terminal part of the [beta]-subunit. The sequence differences observed in the a-subunit are situated in the binding zone of the ligands and are therefore at the origin of the relative affinities of IGF-1R and of 1R for the IGFs and insulin respectively. The differences in the C-terminal part of the [beta]-subunit result in a divergence in the signalling pathways of the two receptors; IGF-1R mediating mitogenic, differentiation and antiapoptosis effects, while the activation of the IR principally involves effects at the level of the metabolic pathways (Baserga et al., Biochim. Biophys. Acta, 1332: F105-126, 1997; Baserga R., Exp. Cell. Res., 253:1-6, 1999). The cytoplasmic tyrosine kinase proteins are activated by the binding of the ligand to the extracellular domain of the receptor. The activation of the kinases in its turn involves the stimulation of different intra-cellular substrates, including IRS-1, IRS-2, Shc and Grb 10 (Peruzzi F. et al., J. Cancer Res. Clin. Oncol., 125:166-173, 1999). The two major substrates of IGF-IR are IRS and Shc which mediate, by the activation of numerous effectors downstream, the majority of the growth and differentiation effects connected with the attachment of the IGFs to this receptor. The availability of substrates can consequently dictate the final biological effect connected with the activation of the IGF-1R. When IRS-1 predominates, the cells tend to proliferate and to transform. When Shc dominates, the cells tend to differentiate (Valentinis B. et al.; J. Biol. Chem. 274:12423-12430, 1999). It seems that the route principally involved for the effects of protection against apoptosis is the phosphatidyl-inositol 3-kinases (PI 3-kinases) route (Prisco M. et al., Horm. Metab. Res., 31:80-89, 1999; Peruzzi F. et al., J. Cancer Res. Clin. Oncol., 125:166-173, 1999). The role of the IGF system in carcinogenesis has become the subject of intensive research in the last ten years. This interest followed the discovery of the fact that in addition to its mitogenic and antiapoptosis properties, IGF-1R seems to be required for the establishment and the maintenance of a transformed phenotype. In fact, it has been well established that an overexpression or a constitutive activation of IGF-1R leads, in a great variety of cells, to a growth of the cells independent of the support in media devoid of fetal calf serum, and to the formation of tumors in nude mice. This in itself is not a unique property since a great variety of products of overexpressed genes can transform cells, including a good number of receptors of growth factors. However, the crucial discovery which has clearly demonstrated the major role played by, IGF-1R in the transformation has been the demonstration that the R-cells, in which the gene coding for IGF-1R has been inactivated, are totally refractory to transformation by different agents which are usually capable of transforming the cells, such as the E5 protein of bovine papilloma virus, an overexpression of EGFR or of PDGFR, the T antigen of SV 40, activated ras or the combination of these two last factors (Sell C. et al., Proc. Natl. Acad. Sci., USA, 90: 11217-11221, 1993; Sell C. et al., Mol. Cell. Biol., 14:3604-3612, 1994; Morrione A. J., Virol., 69:5300-5303, 1995; Coppola D. et al., Mol. Cell. Biol., 14:458a-4595, 1994; DeAngelis T et al., J. Cell. Physiol., 164:214-221, 1995). IGF-1R is expressed in a great variety of tumors and of tumor lines and the IGFs amplify the tumor growth via their attachment to IGF-1R. Other arguments in favor of the role of IGF-IR in carcinogenesis come from studies using murine monoclonal antibodies directed against the receptor or using negative dominants of IGF-IR. In effect, murine monoclonal antibodies directed against IGF-1R inhibit the proliferation of numerous cell lines in culture and the growth of tumor cells in vivo (Arteaga C. et al., Cancer Res., 49:6237-6241, 1989 Li et al., Biochem. Biophys. Res. Com., 196:92-98, 1993; Zia F et al., J. Cell. Biol., 24:269-275, 1996; Scotlandi K et al., Cancer Res., 58:4127-4131, 1998). It has likewise been shown in the works of Jiang et al. (Oncogene, 18:6071-6077, 1999) that a negative dominant of IGF-1R is capable of inhibiting tumor proliferation.

[0021] Though there has been put much effort in identifying novel targets for therapeutic approaches for cancer, cancer is yet one of the most frequently diagnosed diseases. In light of this, there is still need for effective treatments for cancer.

[0022] The present invention provides for a bispecific single chain antibody molecule comprising a first binding domain capable of binding to an epitope of human and non-chimpanzee primate CD3ε (epsilon) chain, wherein the epitope is part of an amino acid sequence comprised in the group consisting of SEQ ID NOs. 2, 4, 6, and 8; and a second binding domain capable of binding to an antigen selected from the group consisting of Prostate stem cell antigen (PSCA), B-Lymphocyte antigen CD19 (CD19), hepatocyte growth factor receptor (C-MET), Endosialin, the EGF-like domain 1 of EpCAM, encoded by exon 2, Fibroblast Activation Protein Alpha (FAP alpha) and Insulin-like growth factor I receptor (IGF-IR or IGF-1R).

[0023] Though T cell-engaging bispecific single chain antibodies described in the art have great therapeutic potential for the treatment of malignant diseases, most of these bispecific molecules are limited in that they are species specific and recognize only human antigen, and—due to genetic similarity—likely the chimpanzee counterpart. The advantage of the present invention is the provision of a bispecific single chain antibody comprising a binding domain exhibiting cross-species specificity to human and non-chimpanzee primate of the CD3 epsilon chain.

[0024] In the present invention, an N-terminal 1-27 amino acid residue polypeptide fragment of the extracellular domain of CD3 epsilon was surprisingly identified which—in contrast to all other known epitopes of CD3 epsilon described in the art—maintains its three-dimensional structural integrity when taken out of its native environment in the CD3 complex (and optionally fused to a heterologous amino acid sequence such as EpCAM or an immunoglobulin Fc part).

[0025] The present invention, therefore, provides for a bispecific single chain antibody molecule comprising a first binding domain capable of binding to an epitope of an N-terminal 1-27 amino acid residue polypeptide fragment of the extracellular domain of CD3 epsilon (which CD3 epsilon is, for example, taken out of its native environment and/or comprised by (presented on the surface of) a T-cell) of human and at least one non-chimpanzee primate CD3 epsilon chain, wherein the epitope is part of an amino acid sequence comprised in the group consisting of SEQ ID NOs. 2, 4, 6, and 8; and a second binding domain capable of binding to prostate-specific membrane antigen (PSMA). Preferred non-chimpanzee primates are mentioned herein elsewhere. At least one (or a selection thereof or all) primate(s) selected from Callithrix jacchus; Saguinus oedipus, Saimiri sciureus, and Macaca fascicularis (either SEQ ID 2225 or 2226 or both), is (are) particularily preferred. Macaca mulatta, also known as Rhesus Monkey is also envisaged as another preferred primate. It is thus envisaged that antibodies of the invention bind to (are capable of binding to) the context independent epitope of an N-terminal 1-27 amino acid residue polypeptide fragment of the extracellular domain of CD3 epsilon of human and Callithrix jacchus, Saguinus oedipus, Saimiri sciureus, and Macaca fascicularis (either SEQ ID 2225 or 2226 or both), and optionally also to Macaca mulatta. A bispecific single chain antibody molecule comprising a first binding domain as defined herein can be obtained (is obtainable by) or can be manufactured in accordance with the protocol set out in the appended Examples (in particular Example 2). To this end, it is envisaged to (a) immunize mice with an N-terminal 1-27 amino acid residue polypeptide fragment of the extracellular domain of CD3 epsilon of human and/or Saimiri sciureus; (b) generation of an immune murine antibody scFv library; (c) identification of CD3 epsilon specific binders by testing the capability to bind to at least SEQ ID NOs. 2, 4, 6, and 8.

[0026] The context-independence of the CD3 epitope provided in this invention corresponds to the first 27 N-terminal amino acids of CD3 epsilon or functional fragments of this 27 amino acid stretch. The phrase “context-independent,” as used herein in relation to the CD3 epitope means that binding of the herein described inventive binding molecules/antibody molecules does not lead to a change or modification of the conformation, sequence, or structure surrounding the antigenic determinant or epitope. In contrast, the CD3 epitope recognized by a conventional CD3 binding molecule (e.g. as disclosed in WO 99/54440 or WO 04/106380) is localized on the CD3 epsilon chain C-terminally to the N-terminal 1-27 amino acids of the context-independent epitope, where it only takes the correct conformation if it is embedded within the rest of the epsilon chain and held in the right sterical position by heterodimerization of the epsilon chain with either the CD3 gamma or delta chain.

[0027] Anti-CD3 binding molecules/domains as part of a bispecific single chain antibody molecule as provided herein and generated (and directed) against a context-independent CD3 epitope provide for a surprising clinical improvement with regard to T cell redistribution and, thus, a more favourable safety profile. Without being bound by theory, since the CD3 epitope is context-independent, forming an autonomous selfsufficient subdomain without much influence on the rest of the CD3 complex, the CD3 binding molecules/domains provided herein induce less allosteric changes in CD3 conformation than the conventional CD3 binding molecules, which recognize context-dependent CD3 epitopes (e.g. as disclosed in WO 99/54440 or WO 04/106380).

[0028] The context-independence of the CD3 epitope which is recognized by the CD3 binding domain of the bispecific single chain antibody of the invention (PSCA×CD3, CD19×CD3, C-MET×CD3. Endosialin×CD3, EpCAM×CD3, IGF-1R×CD3 or FAPα×CD3) is associated with less or no T cell redistribution (T cell redistribution equates with an initial episode of drop and subsequent recovery of absolute T cell counts) during the starting phase of treatment with said bispecific single chain antibodies of the invention. This results in a better safety profile of the bispecific single chain antibodies of the invention compared to conventional CD3 binding molecules known in the art, which recognize context-dependent CD3 epitopes. Particularly, because T cell redistribution during the starting phase of treatment with CD3 binding molecules is a major risk factor for adverse events, like CNS adverse events, the bispecific single chain antibodies of the invention has a substantial safety advantage over the CD3 binding molecules known in the art by recognizing a context-independent rather than a context-dependent CD3 epitope. Patients with such CNS adverse events related to T cell redistribution during the starting phase of treatment with conventional CD3 binding molecules usually suffer from confusion and disorientation, in some cases also from urinary incontinence. Confusion is a change in mental status in which the patient is not able to think with his or her usual level of clarity. The patient usually has difficulties to concentrate and thinking is not only blurred and unclear but often significantly slowed down. Patients with CNS adverse events related to T cell redistribution during the starting phase of treatment with conventional CD3 binding molecules may also suffer from loss of memory. Frequently, the confusion leads to the loss of ability to recognize people, places, time or dates. Feelings of disorientation are common in confusion, and the decision-making ability is impaired. CNS adverse events related to T cell redistribution during the starting phase of treatment with conventional CD3 binding molecules may further comprise blurred speech and/or word finding difficulties. This disorder may impair both, the expression and understanding of language as well as reading and writing. Besides urinary incontinence, vertigo and dizziness may also accompany CNS adverse events related to T cell redistribution during the starting phase of treatment with conventional CD3 binding molecules in some patients.

[0029] The maintenance of the three-dimensional structure within the mentioned 27 amino acid N-terminal polypeptide fragment of CD3 epsilon can be used for the generation of, preferably human, binding domains which are capable of binding to the N-terminal CD3 epsilon polypeptide fragment in vitro and to the native (CD3 epsilon subunit of the) CD3 complex on T cells in vivo with the same binding affinity. These data strongly indicate that the N-terminal fragment as described herein forms a tertiary conformation, which is similar to its structure normally existing in vivo. A very sensitive test for the importance of the structural integrity of the amino acids 1-27 of the N-terminal polypeptide fragment of CD3 epsilon was performed. Individual amino acids of amino acids 1-27 of the N-terminal polypeptide fragment of CD3 epsilon were changed to alanine (alanine scanning) to test the sensitivity of the amino acids 1-27 of the N-terminal polypeptide fragment of CD3 epsilon for minor disruptions. The CD3 binding domains as part of the bispecific single chain antibodies of the invention were used to test for binding to the alanine-mutants of amino acids 1-27 of the N-terminal polypeptide fragment of CD3 epsilon (see appended Example 5). Individual exchanges of the first five amino acid residues at the very N-terminal end of the fragment and two of the amino acids at positions 23 and 25 of the amino acids 1-27 of the N-terminal polypeptide fragment of CD3 epsilon were critical for binding of the antibody molecules. The substitution of amino acid residues in the region of position 1-5 comprising the residues Q (Glutamine at position 1), D (Aspartic acid at position 2), G (Glycine at position 3), N (Asparagine at position 4), and E (Glutamic acid at position 5) to Alanine abolished binding of the, preferably human, bispecific single chain antibodies of the invention to said fragment. While, for at least some of the, preferably human bispecific single chain antibodies of the invention, two amino acid residues at the C-terminus of the mentioned fragment T (Threonine at position 23) and I (Isoleucine at position 25) reduced the binding energy to the, preferably human, bispecific single chain antibodies of the invention.

[0030] Unexpectedly, it has been found that the thus isolated, preferably human, bispecific single chain antibodies of the invention not only recognize the human N-terminal fragment of CD3 epsilon, but also the corresponding homologous fragments of CD3 epsilon of various primates, including New-World Monkeys (Marmoset, Callithrix jacchus; Saguinus oedipus; Saimiri sciureus) and Old-World Monkeys (Macaca fascicularis, also known as Cynomolgus Monkey; or Macaca mulatta, also known as Rhesus Monkey). Thus, multi-primate specificity of the bispecific single chain antibodies of the invention was detected. The following sequence analyses confirmed that human and primates share a highly homologous sequence stretch at the N-terminus of the extracellular domain of CD3 epsilon.

[0031] The amino acid sequence of the aformentioned N-terminal fragments of CD3 epsilon are depicted in SEQ ID No. 2 (human), SEQ ID No. 4 (Callithrix jacchus); SEQ ID No. 6 (Saguinus oedipus); SEQ ID No. 8 (Saimiri sciureus); SEQ ID No. 2225 QDGNEEMGSITQTPYQVSISGTTILTC or SEQ ID No. 2226 QDGNEEMGSITQTPYQVSISGTTVILT (Macaca fascicularis, also known as Cynomolgus Monkey), and SEQ ID No. 2227 QDGNEEMGSITQTPYHVSISGTTVILT (Macaca mulatta, also known as Rhesus Monkey).

[0032] In one embodiment of the invention the second binding domain of the PSCA×CD3 bispecific single chain antibody of the invention binds to the Prostate stem cell antigen (PSCA). In alternative embodiments the second binding domain binds to CD19, C-MET, Endosialin (CD248), EpCAM, FAPα or IGF-1R. As shown in the following examples, the second binding domain of the EpCAM×CD3 bispecific single chain antibody of the invention binds to amino acid residues 26 to 61 of the EGF-like domain 1 of EpCAM which is encoded by Exon 2 of the EpCAM gene. Said amino acid residues 26 to 61 of the EGF-like domain 1 of human EpCAM are shown in SEQ ID NO. 571. Thus, the EpCAM-directed bispecific single chain molecules of this invention form a unique own class of EpCAM-binding molecules, that is clearly differentiated from EpCAM-binding molecules based on the EpCAM-binder HD69 described earlier. Said EpCAM-binder HD69 bind to a different epitope (i.e. an epitope not localized in the EGF-like domain 1 of human EpCAM).

[0033] Preferably, the second binding domain of the PSCA×CD3 (respectively CD19×CD3, C-MET×CD3, Endosialin×CD3, EpCAM×CD3, IGF-1R×CD3 or FAPα×CD3) bispecific single chain antibody binds to the human PSCA (respectively CD19, C-MET, Endosialin, EpCAM, IGF-1R or FAPα) or a non-chimpanzee primate PSCA (respectively CD19, C-MET, Endosialin, EpCAM, IGF-1R or FAPα); more preferred it binds to the human PSCA (respectively CD19, C-MET, Endosialin, EpCAM, IGF-1R or FAPα) and a non-chimpanzee primate PSCA (respectively CD19, C-MET, Endosialin, EpCAM, IGF-1R or FAPα) and therefore is cross-species specific; even more preferred to the human PSCA (respectively CD19, C-MET, Endosialin, EpCAM, IGF-1R or FAPα) and the macaque PSCA (respectively CD19, C-MET, Endosialin, EpCAM, IGF-1R or FAPα) (and therefore is cross-species specific as well). Particularly preferred, the macaque PSCA (respectively CD19, C-MET, Endosialin, EpCAM, IGF-1R or FAPα) is the Cynomolgus monkey PSCA (respectively CD19, C-MET, Endosialin, EpCAM, IGF-1R or FAPα) and/or the Rhesus monkey PSCA (respectively CD19, C-MET, Endosialin, EpCAM, IGF-1R or FAPα). It is to be understood, that the second binding domain of the EpCAM×CD3 bispecific single chain antibody of the invention preferably binds to the EGF-like domain 1 of the non-chimpanzee primate EpCAM which is encoded by Exon 2 of the non-chimpanzee primate EpCAM gene. As indicated above, the non-chimpanzee primate EpCAM is preferably a macaque EpCAM, more preferably the Cynomolgus monkey EpCAM and/or the Rhesus monkey EpCAM.

[0034] However, it is not excluded from the scope of the present invention, that the second binding domain may also bind to PSCA (respectively CD19, C-MET, Endosialin, EpCAM, IGF-1R or FAPα) homologs of other species, such as to the chimpanzee PSCA (respectively CD19, C-MET, Endosialin, EpCAM, IGF-1R or FAPα) or the PSCA (respectively CD19, C-MET, Endosialin, EpCAM, IGF-1R or FAPα) homolog in rodents.

[0035] It will be understood that in a preferred embodiment, the cross-species specificity of the first and second binding domain of the antibodies of the invention is identical.

[0036] Prostate cancer is the second most cancer in men. For 2008, it is estimated that 186,320 men will be newly diagnosed with prostate cancer in the United States and about 28,660 men will die from the disease (see e.g. http://www.cancer.gov/cancertopics/types/prostate). Prostate cancer risk is strongly related to age: very few cases are registered in men under 50 and three-quarters of cases occur in men over 65 years. The largest number of cases is diagnosed in those aged 70-74. Currently, the growth rate of the older population is significantly higher than that of the total population. By 2025-2030, projections indicate that the population over 60 will be growing 3.5 times as rapidly as the total population. The proportion of older persons is projected to more than double worldwide over the next half century, which means that a further increase in incidence of diagnosed prostate cancer has to be expected. However, PSCA is not only a prostate cancer target. Rather, overexpression of PSCA has also been found in bladder cancer (Amara et al., Cancer Res 61 (2001): 4660-4665) and in pancreatic cancer (Argani et al., Cancer Res 61 (2001): 4320-4324). In light of the above, the PSCA×CD3 bispecific single chain antibody of the invention provides an advantageous tool in order to kill PSCA-expressing cancer cells of, including, but not limited to, prostate cancer, bladder cancer or pancreatic cancer in human. As shown in the following Examples, the cytotoxic activity of the PSCA×CD3 bispecific single chain antibody of the invention is higher than the cytotoxic activity of antibodies described in the art.

[0037] Advantageously, the present invention provides also PSCA×CD3 bispecific single chain antibodies comprising a second binding domain which binds both to the human PSCA and to the macaque PSCA homolog, i.e. the homolog of a non-chimpanzee primate. In a preferred embodiment, the bispecific single chain antibody thus comprises a second binding domain exhibiting cross-species specificity to the human and a non-chimpanzee primate Prostate stem cell antigen (PSCA). In this case, the identical bispecific single chain antibody molecule can be used both for preclinical evaluation of safety, activity and/or pharmacokinetic profile of these binding domains in primates and as drugs in humans. Put in other words, the same molecule can be used in preclinical animal studies as well as in clinical studies in humans. This leads to highly comparable results and a much-increased predictive power of the animal studies compared to species-specific surrogate molecules. Since both the CD3 and the PSCA binding domain of the PSCA×CD3 bispecific single chain antibody of the invention are cross-species specific, i.e. reactive with the human and non-chimpanzee primates, it can be used both for preclinical evaluation of safety, activity and/or pharmacokinetic profile of these binding domains in primates and—in the identical form—as drugs in humans.

[0038] CD19 is a cell surface molecule expressed only by B lymphocytes and follicular dendritic cells of the hematopoietic system. It is the earliest of the B-lineage-restricted antigens to be expressed and is present on most pre-B cells and most non-T-cell acute lymphocytic leukemia cells and B-cell type chronic lymphocytic leukemia cells.

[0039] In a preferred embodiment, the bispecific single chain antibody of the invention comprises a second binding domain exhibiting cross-species specificity to the human and a non-chimpanzee primate CD19. In this case, the identical bispecific single chain antibody molecule can be used both for preclinical evaluation of safety, activity and/or pharmacokinetic profile of these binding domains in primates and as drug in humans. This leads to highly comparable results and a much-increased predictive power of the animal studies compared to species-specific surrogate molecules. Since in this embodiment both the CD3 and the CD19 binding domain of the CD19×CD3 bispecific single chain antibody of the invention are cross-species specific, i.e. reactive with the human and non-chimpanzee primates, it can be used both for preclinical evaluation of safety, activity and/or pharmacokinetic profile of these binding domains in primates and—in the identical form—as drug in humans.

[0040] As described herein above, the MET oncogene, encoding the receptor tyrosin kinase (RTK) for hepatocyte growth factor (HGF), and Scatter Factor (SF), controls genetic programs leading to cell growth, invasion, and protection from apoptosis. As shown in the following Examples, the C-MET×CD3 bispecific single chain antibody of the invention thus provides an advantageous tool in order to kill C-MET-expressing cancer cells, as exemplified by the human C-MET positive breast cancer cell line MDA-MB-231. The cytotoxic activity of the C-MET×CD3 bispecific single chain antibody of the invention is higher than the cytotoxic activity of antibodies described in the art. Since preferably both the CD3 and the C-MET binding domain of the C-MET×CD3 bispecific single chain antibody of the invention are cross-species specific, i.e. reactive with the human and non-chimpanzee primates' antigens, the C-MET×CD3 bispecific single chain antibody of the invention can be used for preclinical evaluation of safety, activity and/or pharmacokinetic profile of these binding domains in primates and—in the identical form—as drugs in humans.

[0041] Advantageously, the present invention provides in a further alternative embodiment C-MET×CD3 bispecific single chain antibodies comprising a second binding domain which binds both to the human C-MET and to the macaque C-MET homolog, i.e. the homolog of a non-chimpanzee primate. In a preferred embodiment, the bispecific single chain antibody thus comprises a second binding domain exhibiting cross-species specificity to the human and a non-chimpanzee primate C-MET. In this case, the identical bispecific single chain antibody molecule can be used both for preclinical evaluation of safety, activity and/or pharmacokinetic profile of these binding domains in primates and as drugs in humans. Put in other words, the same molecule can be used in preclinical animal studies as well as in clinical studies in humans. This leads to highly comparable results and a much-increased predictive power of the animal studies compared to species-specific surrogate molecules. Since both the CD3 and the C-MET binding domain of the C-MET×CD3 bispecific single chain antibody of the invention are cross-species specific, i.e. reactive with the human and non-chimpanzee primates' antigens, it can be used both for preclinical evaluation of safety, activity and/or pharmacokinetic profile of these binding domains in primates and—in the identical form—as drugs in humans.

[0042] Angiogenesis, i.e. the formation of new capillaries, is essential to a number of important physiological events, both normal and pathological. Recently, increased attention has focused on the purification and characterization of inhibitors of this process, because of the potential therapeutic value of angiogenesis inhibitors in controlling solid tumors. Because of its restricted normal tissue distribution and abundant expression on tumor endothelial cells of many different types of solid tumors, Endosialin can be used as a target for antibody-based anti-angiogenic treatment strategies of cancer. In particular, targeting of tumor endothelial cells instead of the cancer cells has the advantage that target expression on the untransformed endothelial cells of tumor blood vessels is more stable than target expression on the genetically unstable cancer cells. The Endosialin×CD3 bispecific single chain antibody of the invention provides an advantageous tool in order to inhibit the formation of new capillaries in solid tumors which plays a major role in supporting the growth of the tumors. In this novel and inventive therapeutic approach, it is not the tumor cells which are targeted but tumor blood vessels. The Endosialin×CD3 bispecific single chain antibody of the invention recruits cytotoxic T cells to the Endosialin-positive endothelial cells in tumors, including, but not limited to, carcinomas (breast, kidney, lung, colorectal, colon, pancreas mesothelioma), sarcomas, and neuroectodermal tumors (melanoma, glioma, neuroblastoma), resulting in the depletion of the Endosialin-expressing endothelial cells from the tumor. In this way, tumor angegiogenesis is inhibited resulting in tumor regression or even depletion. As shown in the following Examples, the cytotoxic activity of the Endosialin×CD3 bispecific single chain antibody of the invention is higher than the activity of antibodies described in the art. Since the growth of solid neoplasms requires the recruitment of supporting blood vessels, the therapeutic use of the Endosialin×CD3 bispecific single chain antibody of the invention provides a novel and inventive approach for tumor endothelial targeting and killing.

[0043] Advantageously, the present invention provides also Endosialin×CD3 bispecific single chain antibodies comprising a second binding domain which binds both to the human Endosialin and to the macaque Endosialin homolog, i.e. the homolog of a non-chimpanzee primate. In a preferred embodiment, the bispecific single chain antibody thus comprises a second binding domain exhibiting cross-species specificity to the human and a non-chimpanzee primate Endosialin. In this case, the identical bispecific single chain antibody molecule can be used both for preclinical evaluation of safety, activity and/or pharmacokinetic profile of these binding domains in primates and as drug in humans. Put in other words, the same molecule can be used in preclinical animal studies as well as in clinical studies in humans. This leads to highly comparable results and a much-increased predictive power of the animal studies compared to species-specific surrogate molecules. Since both the CD3 and the Endosialin binding domain of the Endosialin×CD3 bispecific single chain antibody of the invention are cross-species specific, i.e. reactive with the human and non-chimpanzee primates, it can be used both for preclinical evaluation of safety, activity and/or pharmacokinetic profile of these binding domains in primates and—in the identical form—as drug in humans.

[0044] EpCAM has recently been found to be expressed on so called “cancer stem cells” (Dalerba et al., PNAS 104 (2007), 10158-63; Dalerba et al., Ann. Rev. Med. 58 (2007), 267-84). In light of this, the EpCAM×CD3 bispecific single chain antibody of the invention not only provides an advantageous tool in order to kill EpCAM-expressing cancer cells in epithelial cancer or minimal residual cancer, but may also be useful for the elimination of the presumed culprits responsible for tumor relapse after therapy. In addition, the cytotoxic activity of the EpCAM×CD3 bispecific single chain antibody of the invention is higher than the cytotoxic activity of antibodies described in the art.

[0045] In a preferred embodiment, the bispecific single chain antibody of the invention comprises a second binding domain exhibiting cross-species specificity to the human and a non-chimpanzee primate EpCAM. In this case, the identical bispecific single chain antibody molecule can be used both for preclinical evaluation of safety, activity and/or pharmacokinetic profile of these binding domains in primates and as drug in humans. This leads to highly comparable results and a much-increased predictive power of the animal studies compared to species-specific surrogate molecules. Since in this embodiment both the CD3 and the EpCAM binding domain of the EpCAM×CD3 bispecific single chain antibody of the invention are cross-species specific, i.e. reactive with the human and non-chimpanzee primates, it can be used both for preclinical evaluation of safety, activity and/or pharmacokinetic profile of these binding domains in primates and—in the identical form—as drug in humans.

[0046] The FAPalpha×CD3 bispecific single chain antibody of the invention provides an advantageous tool in order to attack the stroma of solid tumors, such as epithelial tumors, which plays a major role in supporting the growth and neovascularisation of tumors. In this novel and inventive therapeutic approach, it is not the tumor cells which are targeted but activated stromal fibroblasts. Previous study have shown that most of the common types of epithelial cancers, including more than 90% of primary and malignant breast, lung and colorectal carcinomas, contain abundant FAP alpha-reactive stromal fibroblasts (Scanlan et al., PNAS 91 (1994), 5657-5661 and references cited therein). In contrast, normal tissues and benign and premalignant epithelial lesions only rarely contain FAP alpha-positive stromal cells. The FAPalpha×CD3 bispecific single chain antibody of the invention recruits cytotoxic T cells to the FAP alpha-positive activated stromal fibroblasts in primary and malignant epithelial tumors resulting in the depletion of the stromal cells from the tumor. In particular, targeting of tumor stromal cells instead of the cancer cells has the advantage that target expression on the untransformed stromal cells is more stable than target expression on the genetically unstable cancer cells. As shown in the following Examples, the cytotoxic activity of the FAPalpha×CD3 bispecific single chain antibody of the invention is higher than the activity of antibodies described in the art. Since the growth of solid neoplasms requires the recruitment of a supporting stroma, the therapeutic use of the FAPalpha×CD3 bispecific single chain antibody of the invention provides a novel and inventive approach for tumor stromal targeting and killing.

[0047] Advantageously, the present invention provides also FAPalpha×CD3 bispecific single chain antibodies comprising a second binding domain which binds both to the human FAP alpha and to the macaque FAP alpha homolog, i.e. the homolog of a non-chimpanzee primate. In a preferred embodiment, the bispecific single chain antibody thus comprises a second binding domain exhibiting cross-species specificity to the human and a non-chimpanzee primate FAP alpha. In this case, the identical bispecific single chain antibody molecule can be used both for preclinical evaluation of safety, activity and/or pharmacokinetic profile of these binding domains in primates and as drugs in humans. Put in other words, the same molecule can be used in preclinical animal studies as well as in clinical studies in humans. This leads to highly comparable results and a much-increased predictive power of the animal studies compared to species-specific surrogate molecules. Since both the CD3 and the FAP alpha binding domain of the FAPalpha×CD3 bispecific single chain antibody of the invention are cross-species specific, i.e. reactive with the human and non-chimpanzee primates, it can be used both for preclinical evaluation of safety, activity and/or pharmacokinetic profile of these binding domains in primates and—in the identical form—as drugs in humans.

[0048] As described herein above, IGF-1R is a receptor (and, thus a cell surface antigen) with tyrosine kinase activity having 70% homology with the insulin receptor 1R. IGF1R is expressed in a great variety of tumors and of tumor lines and the IGFs amplify the tumor growth via their attachment to IGF-1R.

[0049] In a preferred embodiment, the bispecific single chain antibody of the invention comprises a second binding domain exhibiting cross-species specificity to the human and a non-chimpanzee primate IGF-1R. In this case, the identical bispecific single chain antibody molecule can be used both for preclinical evaluation of safety, activity and/or pharmacokinetic profile of these binding domains in primates and as drug in humans. This leads to highly comparable results and a much-increased predictive power of the animal studies compared to species-specific surrogate molecules. Since in this embodiment both the CD3 and the IGF-1R binding domain of the IGF-1R×CD3 bispecific single chain antibody of the invention are cross-species specific, i.e. reactive with the human and non-chimpanzee primates, it can be used both for preclinical evaluation of safety, activity and/or pharmacokinetic profile of these binding domains in primates and—in the identical form—as drug in humans.

[0050] It has been found in the present invention that it is possible to generate a, preferably human, PSCA×CD3 (respectively CD19×CD3, C-MET×CD3, Endosialin×CD3, EpCAM×CD3, IGF-1R×CD3 or FAPα×CD3) bispecific single chain antibody wherein the identical molecule can be used in preclinical animal testing, as well as clinical studies and even in therapy in human. This is due to the unexpected identification of the, preferably human, PSCA×CD3 (respectively CD19×CD3, C-MET×CD3, Endosialin×CD3, EpCAM×CD3, IGF-1R×CD3 or FAPα×CD3) bispecific single chain antibody, which, in addition to binding to human CD3 epsilon and PSCA (respectively CD19, C-MET, Endosialin, EpCAM, IGF-1R or FAPα), respectively, (and due to genetic similarity likely to the chimpanzee counterpart), also binds to the homologs of said antigens of non-chimpanzee primates, including New-World Monkeys and Old-World Monkeys. As shown in the following Examples, said preferably human, PSCA×CD3 (respectively CD19×CD3, C-MET×CD3, Endosialin×CD3, EpCAM×CD3, IGF-1R×CD3 or FAPα×CD3) bispecific single chain antibody of the invention can be used as therapeutic agent or drug against various diseases, including, but not limited, to cancer.

[0051] The PSCA×CD3 bispecific single chain antibody is particularly advantageous for the therapy of prostate cancer, bladder cancer or pancreatic cancer.

[0052] Said preferably human CD19×CD3 bispecific single chain antibody of the invention can be used as therapeutic agent against various diseases, including but not limited to cancer, preferably B-cell malignancies, such as non-Hodgkin Lymphoma, B-cell mediated autoimmune diseases or the depletion of B-cells.

[0053] Said preferably human c-MET×CD3 bispecific single chain antibody of the invention can be used as therapeutic agent against various diseases, including but not limited to cancer, preferably carcinoma, sarcoma, glioblastoma/astrocytoma, melanoma, mesothelioma, Wilms tumor or a hematopoietic malignancy such as leukemia, lymphoma or multiple myeloma.

[0054] Said preferably human Endosialin×CD3 bispecific single chain antibody of the invention provides a novel and inventive approach for tumor endothelium targeting and killing for including (but not limited to) carcinomas (breast, kidney, lung, colorectal, colon, pancreas mesothelioma), sarcomas, and neuroectodermal tumors (melanoma, glioma, neuroblastoma). The Endosialin×CD3 bispecific single chain antibody of the invention can deprive solid tumors of their supporting blood vessels, thereby inhibiting angiogenesis and consequently the growth of said neoplasms.

[0055] Said preferably human EpCAM×CD3 bispecific single chain antibody of the invention can be used as therapeutic agent against various diseases, including but not limited to cancer, preferably epthelial cancer.

[0056] Said preferably human IGF-1R×CD3 bispecific single chain antibody of the invention can be used as therapeutic agent against various diseases, including but not limited to cancer, preferably bone or soft tissue cancer (e.g. Ewing sarcoma), breast, liver, lung, head and neck, colorectal, prostate, leiomyosarcoma, cervical and endometrial cancer, ovarian, prostate, and pancreatic cancer. IGF-1R×CD3 bispecific single chain antibody of the invention can be used as therapeutic agent against autoimmune diseases, preferably psoriasis.

[0057] In view of the above, the need to construct a surrogate PSCA×CD3 (respectively CD19×CD3, C-MET×CD3, Endosialin×CD3, EpCAM×CD3, IGF-1R×CD3 or FAPα×CD3) bispecific single chain antibody for testing in a phylogenetic distant (from humans) species disappears. As a result, the identical molecule can be used in animal preclinical testing as is intended to be administered to humans in clinical testing as well as following market approval and therapeutic drug administration. The ability to use the same molecule for preclinical animal testing as in later administration to humans virtually eliminates, or at least greatly reduces, the danger that the data obtained in preclinical animal testing have limited applicability to the human case. In short, obtaining preclinical safety data in animals using the same molecule as will actually be administered to humans does much to ensure the applicability of the data to a human-relevant scenario. In contrast, in conventional approaches using surrogate molecules, said surrogate molecules have to be molecularly adapted to the animal test system used for preclinical safety assessment. Thus, the molecule to be used in human therapy in fact differs in sequence and also likely in structure from the surrogate molecule used in preclinical testing in pharmacokinetic parameters and/or biological activity, with the consequence that data obtained in preclinical animal testing have limited applicability/transferability to the human case. The use of surrogate molecules requires the construction, production, purification and characterization of a completely new construct. This leads to additional development costs and time necessary to obtain that molecule. In sum, surrogates have to be developed separately in addition to the actual drug to be used in human therapy, so that two lines of development for two molecules have to be carried out. Therefore, a major advantage of the, preferably human, PSCA×CD3 (respectively CD19×CD3, C-MET×CD3, Endosialin×CD3, EpCAM×CD3, IGF-1R×CD3 or FAPα×CD3) bispecific single chain antibody of the invention exhibiting cross-species specificity described herein is that the identical molecule can be used for therapeutics in humans and in preclinical animal testing.

[0058] It is preferred that at least one of said first or second binding domains of the bispecific single chain antibody of the invention is CDR-grafted, humanized or human, as set forth in more detail below. Preferably, both the first and second binding domains of the bispecific single chain antibody of the invention are CDR-grafted, humanized or human. For the preferably human, PSCA×CD3 (respectively CD19×CD3, C-MET×CD3, Endosialin×CD3, EpCAM×CD3, IGF-1R×CD3 or FAPα×CD3) bispecific single chain antibody of the invention, the generation of an immune reaction against said binding molecules is excluded to the maximum possible extent upon administration of the molecule to human patients.

[0059] Another major advantage of the, preferably human, PSCA×CD3 (respectively CD19×CD3, C-MET×CD3, Endosialin×CD3, EpCAM×CD3, IGF-1R×CD3 or FAPα×CD3) bispecific single chain antibody of the invention is its applicability for preclinical testing in various primates. The behavior of a drug candidate in animals should ideally be indicative of the expected behavior of this drug candidate upon administration to humans. As a result, the data obtained from such preclinical testing should therefore generally have a highly predictive power for the human case. However, as learned from the tragic outcome of the recent Phase I clinical trial on TGN1412 (a CD28 monoclonal antibody), a drug candidate may act differently in a primate species than in humans: Whereas in preclinical testing of said antibody no or only limited adverse effects have been observed in animal studies performed with cynomolgus monkeys, six human patients developed multiple organ failure upon administration of said antibody (Lancet 368 (2006), 2206-7). The results of these dramatic, non-desired negative events suggest that it may not be sufficient to limit preclinical testing to only one (non-chimpanzee primate) species. The fact that the PSCA×CD3 (respectively CD19×CD3, C-MET×CD3, Endosialin×CD3, EpCAM×CD3, IGF-1R×CD3 or FAPα×CD3) bispecific single chain antibody of the invention binds to a series of New-World and Old-World Monkeys may help to overcome the problems faced in the case mentioned above. Accordingly, the present invention provides means and methods for minimizing species differences in effects when drugs for human therapy are being developed and tested.

[0060] With the, preferably human, cross-species specific PSCA×CD3 (respectively CD19×CD3, C-MET×CD3, Endosialin×CD3, EpCAM×CD3, IGF-1R×CD3 or FAPα×CD3) bispecific single chain antibody of the invention it is also no longer necessary to adapt the test animal to the drug candidate intended for administration to humans, such as e.g. the creation of transgenic animals. The, preferably human, PSCA×CD3 (respectively CD19×CD3, C-MET×CD3, Endosialin×CD3, EpCAM×CD3, IGF-1R×CD3 or FAPα×CD3) bispecific single chain antibody of the invention exhibiting cross-species specificity according to the uses and the methods of invention can be directly used for preclinical testing in non-chimpanzee primates, without any genetic manipulation of the animals. As well known to those skilled in the art, approaches in which the test animal is adapted to the drug candidate always bear the risk that the results obtained in the preclinical safety testing are less representative and predictive for humans due to the modification of the animal. For example, in transgenic animals, the proteins encoded by the transgenes are often highly over-expressed. Thus, data obtained for the biological activity of an antibody against this protein antigen may be limited in their predictive value for humans in which the protein is expressed at much lower, more physiological levels.

[0061] A further advantage of the uses of the preferably human PSCA×CD3 (respectively CD19×CD3, C-MET×CD3, Endosialin×CD3, EpCAM×CD3, IGF-1R×CD3 or FAPα×CD3) bispecific single chain antibody of the invention exhibiting cross-species specificity is the fact that chimpanzees as an endangered species are avoided for animal testing. Chimpanzees are the closest relatives to humans and were recently grouped into the family of hominids based on the genome sequencing data (Wildman et al., PNAS 100 (2003), 7181). Therefore, data obtained with chimpanzee is generally considered to be highly predictive for humans. However, due to their status as endangered species, the number of chimpanzees, which can be used for medical experiments, is highly restricted. As stated above, maintenance of chimpanzees for animal testing is therefore both costly and ethically problematic. The uses of the, preferably human, PSCA×CD3 (respectively CD19×CD3, C-MET×CD3, Endosialin×CD3, EpCAM×CD3, IGF-1R×CD3 or FAPα×CD3) bispecific single chain antibody of the invention avoid both ethical objections and financial burden during preclinical testing without prejudicing the quality, i.e. applicability, of the animal testing data obtained. In light of this, the uses of the, preferably human, PSCA×CD3 (respectively CD19×CD3, C-MET×CD3, Endosialin×CD3, EpCAM×CD3, IGF-1R×CD3 or FAPα×CD3) bispecific single chain antibody of the invention provide for a reasonable alternative for studies in chimpanzees.

[0062] A still further advantage of the, preferably human, PSCA×CD3 (respectively CD19×CD3, C-MET×CD3, Endosialin×CD3, EpCAM×CD3, IGF-1R×CD3 or FAPα×CD3) bispecific single chain antibody of the invention is the ability of extracting multiple blood samples when using it as part of animal preclinical testing, for example in the course of pharmacokinetic animal studies. Multiple blood extractions can be much more readily obtained with a non-chimpanzee primate than with lower animals, e.g. a mouse. The extraction of multiple blood samples allows continuous testing of blood parameters for the determination of the biological effects induced by the, preferably human, PSCA×CD3 (respectively CD19×CD3, C-MET×CD3, Endosialin×CD3, EpCAM×CD3, IGF-1R×CD3 or FAPα×CD3) bispecific single chain antibody of the invention. Furthermore, the extraction of multiple blood samples enables the researcher to evaluate the pharmacokinetic profile of the, preferably human, PSCA×CD3 (respectively CD19×CD3, C-MET×CD3, Endosialin×CD3, EpCAM×CD3, IGF-1R×CD3 or FAPα×CD3) bispecific single chain antibody of the invention as defined herein. In addition, potential side effects, which may be induced by said, preferably human, PSCA×CD3 (respectively CD19×CD3, C-MET×CD3, Endosialin×CD3, EpCAM×CD3, IGF-1R×CD3 or FAPα×CD3) bispecific single chain antibody of the invention reflected in blood parameters can be measured in different blood samples extracted during the course of the administration of said antibody.

[0063] This allows the determination of the potential toxicity profile of the, preferably human, PSCA×CD3 (respectively CD19×CD3, C-MET×CD3, Endosialin×CD3, EpCAM×CD3, IGF-1R×CD3 or FAPα×CD3) bispecific single chain antibody of the invention as defined herein.

[0064] The advantages of the, preferably human, PSCA×CD3 (respectively CD19×CD3, C-MET×CD3, Endosialin×CD3, EpCAM×CD3, IGF-1R×CD3 or FAPα×CD3) bispecific single chain antibody of the invention as defined herein exhibiting cross-species specificity may be briefly summarized as follows: First, the, preferably human, PSCA×CD3 (respectively CD19×CD3, C-MET×CD3, Endosialin×CD3, EpCAM×CD3, IGF-1R×CD3 or FAPα×CD3) bispecific single chain antibody of the invention as defined herein used in preclinical testing is the same as the one used in human therapy. Thus, it is no longer necessary to develop two independent molecules, which may differ in their pharmacokinetic properties and biological activity. This is highly advantageous in that e.g. the pharmacokinetic results are more directly transferable and applicable to the human setting than e.g. in conventional surrogate approaches.

[0065] Second, the uses of the, preferably human, PSCA×CD3 (respectively CD19×CD3, C-MET×CD3, Endosialin×CD3, EpCAM×CD3, IGF-1R×CD3 or FAPα×CD3) bispecific single chain antibody of the invention as defined herein for the preparation of therapeutics in human is less cost- and labor-intensive than surrogate approaches.

[0066] Third, the, preferably human, PSCA×CD3 (respectively CD19×CD3, C-MET×CD3, Endosialin×CD3, EpCAM×CD3, IGF-1R×CD3 or FAPα×CD3) bispecific single chain antibody of the invention as defined herein can be used for preclinical testing not only in one primate species, but in a series of different primate species, thereby limiting the risk of potential species differences between primates and human.

[0067] Fourth, chimpanzee as an endangered species for animal testing can be avoided if desired.

[0068] Fifth, multiple blood samples can be extracted for extensive pharmacokinetic studies.

[0069] Sixth, due to the human origin of the, preferably human, binding molecules according to a preferred embodiment of the invention the generation of an immune reaction against said binding molecules is minimalized when administered to human patients. Induction of an immune response with antibodies specific for a drug candidate derived from a non-human species as e.g. a mouse leading to the development of human-anti-mouse antibodies (HAMAs) against therapeutic molecules of murine origin is excluded.

[0070] Last but not least:
[0071] the therapeutic use of the PSCA×CD3 bispecific single chain antibody of the invention provides a novel and inventive therapeutic approach for cancer, including, but not limited to, prostate cancer, bladder cancer or pancreatic cancer. The following examples clearly demonstrate for each construct the potent recruitment of cytotoxic activity of human and macaque effector cells against cells positive for PSCA.
[0072] the therapeutic use of the CD19×CD3 bispecific single chain antibody of the invention provides a novel and inventive therapeutic approach for cancer, preferably B-cell malignancies, such as non-Hodgkin lymphoma, B-cell mediated autoimmune diseases or the depletion of B-cells. As shown in the following Examples, the cytotoxic activity of the CD19×CD3 bispecific single chain antibody of the invention is higher than the activity of antibodies described in the art.
[0073] the therapeutic use of the C-MET×CD3 bispecific single chain antibody of the invention provides a novel and inventive therapeutic approach for cancer, preferably carcinoma, sarcoma, glioblastoma/astrocytoma, melanoma, mesothelioma, Wilms tumor or a hematopoietic malignancy such as leukemia, lymphoma or multiple myeloma. As shown in the following Examples, the cytotoxic activity of the C-MET×CD3 bispecific single chain antibody of the invention is higher than the activity of antibodies described in the art.
[0074] the therapeutic use of the Endosialin×CD3 bispecific single chain antibody of the invention provides a novel and inventive approach for tumor endothelium targeting and killing for including (but not limited to) carcinomas (breast, kidney, lung, colorectal, colon, pancreas mesothelioma), sarcomas, and neuroectodermal tumors (melanoma, glioma, neuroblastoma). The Endosialin×CD3 bispecific single chain antibody of the invention can deprive solid tumors of their supporting blood vessels, thereby inhibiting angiogenesis and consequently the growth of said neoplasms.
[0075] the therapeutic use of the EpCAM×CD3 bispecific single chain antibody of the invention provides a novel and inventive therapeutic approach for cancer, preferably epithelial cancer and/or a minimal residual cancer. The EpCAM×CD3 bispecific single chain antibody of the invention not only provides an advantageous tool in order to kill EpCAM-expressing cancer cells in cancer, preferably epithelial cancer or a minimal residual cancer, but may also be useful for the elimination of the presumed culprits responsible for tumor relapse after therapy. In addition, the cytotoxic activity of the EpCAM×CD3 bispecific single chain antibody of the invention is higher than the cytotoxic activity of antibodies described in the art.
[0076] the therapeutic use of the FAPalpha×CD3 bispecific single chain antibody of the invention provides a novel and inventive approach for tumor stromal targeting and killing: The FAPalpha×CD3 bispecific single chain antibody of the invention deprives solid tumors, such as epithelial tumors, of their supporting stroma, thereby inhibiting the growth and neovascularisation of solid neoplasms.
[0077] the therapeutic use of the IGF-1R×CD3 bispecific single chain antibody of the invention provides a novel and inventive approach for cancer (preferably bone or soft tissue cancer (e.g. Ewing sarcoma), breast, liver, lung, head and neck, colorectal, prostate, leiomyosarcoma, cervical and endometrial cancer, ovarian, prostate, and pancreatic cancer) or autoimmune diseases (preferably psoriasis).

[0078] As noted herein above, the present invention provides polypeptides, i.e. bispecific single chain antibodies, comprising a first binding domain capable of binding to an epitope of human and non-chimpanzee primate CD3ε chain and a second binding domain capable of binding to PSCA (respectively CD19, C-MET, Endosialin, EpCAM, IGF-1R or FAPα), wherein the second binding domain preferably also binds to PSCA (respectively CD19, C-MET, Endosialin, EpCAM, IGF-1R or FAPα) of a human and a non-chimpanzee primate. The advantage of bispecific single chain antibody molecules as drug candidates fulfilling the requirements of the preferred bispecific single chain antibody of the invention is the use of such molecules in preclinical animal testing as well as in clinical studies and even for therapy in human. In a preferred embodiment of the cross-species specific bispecific single chain antibodies of the invention the second binding domain binding to a cell surface antigen is human. In a cross-species specific bispecific molecule according to the invention the binding domain binding to an epitope of human and non-chimpanzee primate CD3 epsilon chain is located in the order VH-VL or VL-VH at the N-terminus or the C-terminus of the bispecific molecule. Examples for cross-species specific bispecific molecules according to the invention in different arrangements of the VH-and the VL-chain in the first and the second binding domain are described in the appended examples.

[0079] As used herein, a “bispecific single chain antibody” denotes a single polypeptide chain comprising two binding domains. Each binding domain comprises one variable region from an antibody heavy chain (“VH region”), wherein the VH region of the first binding domain specifically binds to the CD3ε molecule, and the VH region of the second binding domain specifically binds to PSCA, CD19, C-MET, Endosialin, EpCAM, IGF-1R or FAPα. The two binding domains are optionally linked to one another by a short polypeptide spacer. A non-limiting example for a polypeptide spacer is Gly-Gly-Gly-Gly-Ser (G-G-G-G-S) and repeats thereof. Each binding domain may additionally comprise one variable region from an antibody light chain (“VL region”), the VH region and VL region within each of the first and second binding domains being linked to one another via a polypeptide linker, for example of the type disclosed and claimed in EP 623679 B1, but in any case long enough to allow the VH region and VL region of the first binding domain and the VH region and VL region of the second binding domain to pair with one another such that, together, they are able to specifically bind to the respective first and second binding domains.

[0080] The term “protein” is well known in the art and describes biological compounds. Proteins comprise one or more amino acid chains (polypeptides), whereby the amino acids are bound among one another via a peptide bond. The term “polypeptide” as used herein describes a group of molecules, which consists of more than 30 amino acids. In accordance with the invention, the group of polypeptides comprises “proteins” as long as the proteins consist of a single polypeptide chain. Also in line with the definition the term “polypeptide” describes fragments of proteins as long as these fragments consist of more than 30 amino acids. Polypeptides may further form multimers such as dimers, trimers and higher oligomers, i.e. consisting of more than one polypeptide molecule. Polypeptide molecules forming such dimers, trimers etc. may be identical or non-identical. The corresponding higher order structures of such multimers are, consequently, termed homo- or heterodimers, homo- or heterotrimers etc. An example for a hereteromultimer is an antibody molecule, which, in its naturally occurring form, consists of two identical light polypeptide chains and two identical heavy polypeptide chains. The terms “polypeptide” and “protein” also refer to naturally modified polypeptides/proteins wherein the modification is effected e.g. by post-translational modifications like glycosylation, acetylation, phosphorylation and the like. Such modifications are well known in the art.

[0081] The term “binding domain” characterizes in connection with the present invention a domain of a polypeptide which specifically binds to/interacts with a given target structure/antigen/epitope. Thus, the binding domain is an “antigen-interaction-site”. The term “antigen-interaction-site” defines, in accordance with the present invention, a motif of a polypeptide, which is able to specifically interact with a specific antigen or a specific group of antigens, e.g. the identical antigen in different species. Said binding/interaction is also understood to define a “specific recognition”. The term “specifically recognizing” means in accordance with this invention that the antibody molecule is capable of specifically interacting with and/or binding to at least two, preferably at least three, more preferably at least four amino acids of an antigen, e.g. the human CD3 antigen as defined herein. Such binding may be exemplified by the specificity of a “lock-and-key-principle”. Thus, specific motifs in the amino acid sequence of the binding domain and the antigen bind to each other as a result of their primary, secondary or tertiary structure as well as the result of secondary modifications of said structure. The specific interaction of the antigen-interaction-site with its specific antigen may result as well in a simple binding of said site to the antigen. Moreover, the specific interaction of the binding domain/antigen-interaction-site with its specific antigen may alternatively result in the initiation of a signal, e.g. due to the induction of a change of the conformation of the antigen, an oligomerization of the antigen, etc. A preferred example of a binding domain in line with the present invention is an antibody. The binding domain may be a monoclonal or polyclonal antibody or derived from a monoclonal or polyclonal antibody.

[0082] The term “antibody” comprises derivatives or functional fragments thereof which still retain the binding specificity. Techniques for the production of antibodies are well known in the art and described, e.g. in Harlow and Lane “Antibodies, A Laboratory Manual”, Cold Spring Harbor Laboratory Press, 1988 and Harlow and Lane “Using Antibodies: A Laboratory Manual” Cold Spring Harbor Laboratory Press, 1999. The term “antibody” also comprises immunoglobulins (Ig's) of different classes (i.e. IgA, IgG, IgM, IgD and IgE) and subclasses (such as IgG1, IgG2 etc.).

[0083] The definition of the term “antibody” also includes embodiments such as chimeric, single chain and humanized antibodies, as well as antibody fragments, like, inter alia, Fab fragments. Antibody fragments or derivatives further comprise F(ab′)₂, Fv, scFv fragments or single domain antibodies, single variable domain antibodies or immunoglobulin single variable domain comprising merely one variable domain, which might be VH or VL, that specifically bind to an antigen or epitope independently of other V regions or domains; see, for example, Harlow and Lane (1988) and (1999), loc. cit. Such immunoglobulin single variable domain encompasses not only an isolated antibody single variable domain polypeptide, but also larger polypeptides that comprise one or more monomers of an antibody single variable domain polypeptide sequence.

[0084] Various procedures are known in the art and may be used for the production of such antibodies and/or fragments. Thus, the (antibody) derivatives can also be produced by peptidomimetics. Further, techniques described for the production of single chain antibodies (see, inter alia, U.S. Pat. No. 4,946,778) can be adapted to produce single chain antibodies specific for elected polypeptide(s). Also, transgenic animals may be used to express humanized antibodies specific for polypeptides and fusion proteins of this invention. For the preparation of monoclonal antibodies, any technique, providing antibodies produced by continuous cell line cultures can be used. Examples for such techniques include the hybridoma technique (Köhler and Milstein Nature 256 (1975), 495-497), the trioma technique, the human B-cell hybridoma technique (Kozbor, Immunology Today 4 (1983), 72) and the EBV-hybridoma technique to produce human monoclonal antibodies (Cole et al., Monoclonal Antibodies and Cancer Therapy, Alan R. Liss, Inc. (1985), 77-96). Surface plasmon resonance as employed in the BIAcore system can be used to increase the efficiency of phage antibodies which bind to an epitope of a target polypeptide, such as CD3 epsilon, PSCA, CD19, C-MET, Endosialin, EpCAM, IGF-1R or FAPα (Schier, Human Antibodies Hybridomas 7 (1996), 97-105; Malmborg, J. Immunol. Methods 183 (1995), 7-13). It is also envisaged in the context of this invention that the term “antibody” comprises antibody constructs, which may be expressed in a host as described herein below, e.g. antibody constructs which may be transfected and/or transduced via, inter alia, viruses or plasmid vectors.

[0085] The term “specific interaction” as used in accordance with the present invention means that the binding domain does not or does not significantly cross-react with polypeptides which have similar structure as those bound by the binding domain, and which might be expressed by the same cells as the polypeptide of interest. Crossreactivity of a panel of binding domains under investigation may be tested, for example, by assessing binding of said panel of binding domains under conventional conditions (see, e.g., Harlow and Lane, Antibodies: A Laboratory Manual, Cold Spring Harbor Laboratory Press, 1988 and Using Antibodies: A Laboratory Manual, Cold Spring Harbor Laboratory Press, 1999). Examples for the specific interaction of a binding domain with a specific antigen comprise the specificity of a ligand for its receptor. Said definition particularly comprises the interaction of ligands, which induce a signal upon binding to its specific receptor. Examples for said interaction, which is also particularly comprised by said definition, is the interaction of an antigenic determinant (epitope) with the binding domain (antigenic binding site) of an antibody.

[0086] The term “cross-species specificity” or “interspecies specificity” as used herein means binding of a binding domain described herein to the same target molecule in humans and non-chimpanzee primates. Thus, “cross-species specificity” or “interspecies specificity” is to be understood as an interspecies reactivity to the same molecule “X” (i.e. the homolog) expressed in different species, but not to a molecule other than “X”. Cross-species specificity of a monoclonal antibody recognizing e.g. human CD3 epsilon, to a non-chimpanzee primate CD3 epsilon, e.g. macaque CD3 epsilon, can be determined, for instance, by FACS analysis. The FACS analysis is carried out in a way that the respective monoclonal antibody is tested for binding to human and non-chimpanzee primate cells, e.g. macaque cells, expressing said human and non-chimpanzee primate CD3 epsilon antigens, respectively. An appropriate assay is shown in the following examples. The above-mentioned subject matter applies mutatis mutandis for the PSCA, CD19, C-MET, Endosialin, EpCAM, IGF-1R and FAPα antigen: Cross-species specificity of a monoclonal antibody recognizing e.g. human PSCA, CD19, C-MET, Endosialin, EpCAM, IGF-1R or FAPα, to a non-chimpanzee primate PSCA, CD19, C-MET, Endosialin, EpCAM, IGF-1R or FAPα, e.g. macaque PSCA, CD19, C-MET, Endosialin, EpCAM, IGF-1R or FAPα, can be determined, for instance, by FACS analysis. The FACS analysis is carried out in a way that the respective monoclonal antibody is tested for binding to human and non-chimpanzee primate cells, e.g. macaque cells, expressing said human and non-chimpanzee primate PSCA, CD19, C-MET, Endosialin, EpCAM, IGF-1R or FAPα antigens, respectively.

[0087] As used herein, CD3 epsilon denotes a molecule expressed as part of the T cell receptor and has the meaning as typically ascribed to it in the prior art. In human, it encompasses in individual or independently combined form all known CD3 subunits, for example CD3 epsilon, CD3 delta, CD3 gamma, CD3 zeta, CD3 alpha and CD3 beta. The non-chimpanzee primate, non-human CD3 antigens as referred to herein are, for example, Macaca fascicularis CD3 and Macaca mulatta CD3. In Macaca fascicularis, it encompasses CD3 epsilon FN-18 negative and CD3 epsilon FN-18 positive, CD3 gamma and CD3 delta. In Macaca mulatta, it encompasses CD3 epsilon, CD3 gamma and CD3 delta. Preferably, said CD3 as used herein is CD3 epsilon.

[0088] The human CD3 epsilon is indicated in GenBank Accession No.NM_000733 and comprises SEQ ID NO. 1. The human CD3 gamma is indicated in GenBank Accession NO. NM_000073. The human CD3 delta is indicated in GenBank Accession No. NM_000732.

[0089] The CD3 epsilon “FN-18 negative” of Macaca fascicularis (i.e. CD3 epsilon not recognized by monoclonal antibody FN-18 due to a polymorphism as set forth above) is indicated in GenBank Accession No. AB073994.

[0090] The CD3 epsilon “FN-18 positive” of Macaca fascicularis (i.e. CD3 epsilon recognized by monoclonal antibody FN-18) is indicated in GenBank Accession No. AB073993.

[0091] The CD3 gamma of Macaca fascicularis is indicated in GenBank Accession No. AB073992. The CD3 delta of Macaca fascicularis is indicated in GenBank Accession No. AB073991.

[0092] The nucleic acid sequences and amino acid sequences of the respective CD3 epsilon, gamma and delta homologs of Macaca mulatta can be identified and isolated by recombinant techniques described in the art (Sambrook et al. Molecular Cloning: A Laboratory Manual; Cold Spring Harbor Laboratory Press, 3^{rd} edition 2001). This applies mutatis mutandis to the CD3 epsilon, gamma and delta homologs of other non-chimpanzee primates as defined herein. The identification of the amino acid sequence of Callithrix jacchus, Saimiri sciureus und Saguinus oedipus is described in the appended examples. The amino acid sequence of the extracellular domain of the CD3 epsilon of Callithrix jacchus is depicted in SEQ ID NO: 3, the one of Saguinus oedipus is depicted in SEQ ID NO: 5 and the one of Saimiri sciureus is depicted in SEQ ID NO: 7.

[0093] The human PSCA is indicated in GenBank Accession No.NM_005672. The corresponding cDNA and amino acid sequences are shown in SEQ ID NOs. 444 and 443, respectively. The cloning of the PSCA homolog of macaque is demonstrated in the following examples, the corresponding cDNA and amino acid sequences are shown in SEQ ID NOs. 446 and 445, respectively.

[0094] The human CD19 is indicated in GenBank Accession No. NM_001770. On the basis of this sequence information it is possible for the person skilled in the art without any inventive ado to clone (and express) the macaque CD19 molecule. For example, the human CD19 cDNA or a fragment thereof indicated in GenBank Accession No. NM_001770 can be used as a hybridization probe in order to screen a macaque cDNA library (e.g. a cDNA library of Cynomolgus monkey or Rhesus monkey) under appropriate hybridization conditions. Recombinant techniques and screening methods (including hybridization approaches) in molecular biology are described e.g. in Sambrook et al. Molecular Cloning: A Laboratory Manual; Cold Spring Harbor Laboratory Press, 3^{rd} edition 2001.

[0095] The human C-MET is indicated in GenBank Accession No.NM_000245. The corresponding cDNA and amino acid sequences are shown in SEQ ID NOs. 776 and 777, respectively. The cloning of the C-MET homolog of macaque is demonstrated in the following examples, the corresponding cDNA and amino acid sequences are shown in SEQ ID NOs. 788 and 789, respectively.

[0096] The human Endosialin is indicated in GenBank Accession No. NM_020404. The corresponding cDNA and amino acid sequences are shown in SEQ ID NOs. 913 and 914, respectively. The cloning of the Endosialin homolog of macaque is demonstrated in the following examples, the corresponding cDNA and amino acid sequences are shown in SEQ ID NOs. 915 and 916, respectively.

[0097] The human EpCAM is indicated in GenBank Accession No. NM_002354. The corresponding cDNA and amino acid sequences are shown in SEQ ID NOs. 1029 and 1028, respectively. As demonstrated in the following examples, the second binding domain of the EpCAM×CD3 bispecific single chain antibody of the invention binds to an epitope localized in amino acid residues 26 to 61 of the EGF-like domain 1 of EpCAM which is encoded by Exon 2 of the EpCAM gene. Said amino acids residues 26 to 61 of the EGF-like domain 1 of human EpCAM are shown in SEQ ID NO. 1130. On the basis of this sequence information it is possible for the person skilled in the art without any inventive ado to clone (and express) the macaque EpCAM molecule. For example, the human EpCAM cDNA or a fragment thereof indicated in GenBank Accession No. NM_002354 can be used as a hybridization probe in order to screen a macaque cDNA library (e.g. a cDNA library of Cynomolgus monkey or Rhesus monkey) under appropriate hybridization conditions. Recombinant techniques and screening methods (including hybridization approaches) in molecular biology are described e.g. in Sambrook et al. Molecular Cloning: A Laboratory Manual; Cold Spring Harbor Laboratory Press, 3^{rd} edition 2001.

[0098] The human FAP alpha is indicated in GenBank Accession No. NM_004460. The corresponding cDNA and amino acid sequences are shown in SEQ ID NOs. 1149 and 1150, respectively. The cloning of the FAP alpha homolog of macaque is demonstrated in the following examples, the corresponding cDNA and amino acid sequences are shown in SEQ ID NOs. 1151 and 1152, respectively.

[0099] The human IGF-1R is indicated in GenBank Accession No. NM_000875. The corresponding cDNA and amino acid sequences are shown in SEQ ID NOs. 1988 and 1989, respectively. The coding sequence of macaque IGF-1R as published in GenBank (Accession number XM_001100407). The corresponding cDNA and amino acid sequences are shown in SEQ ID NOs. 1998 and 1999, respectively.

[0100] In line with the above, the term “epitope” defines an antigenic determinant, which is specifically bound/identified by a binding domain as defined herein. The binding domain may specifically bind to/interact with conformational or continuous epitopes, which are unique for the target structure, e.g. the human and non-chimpanzee primate CD3 epsilon chain or the human and non-chimpanzee primate PSCA, CD19, C-MET, Endosialin, EpCAM, IGF-1R or FAPα. A conformational or discontinuous epitope is characterized for polypeptide antigens by the presence of two or more discrete amino acid residues which are separated in the primary sequence, but come together on the surface of the molecule when the polypeptide folds into the native protein/antigen (Sela, (1969) Science 166, 1365 and Laver, (1990) Cell 61, 553-6). The two or more discrete amino acid residues contributing to the epitope are present on separate sections of one or more polypeptide chain(s). These residues come together on the surface of the molecule when the polypeptide chain(s) fold(s) into a three-dimensional structure to constitute the epitope. In contrast, a continuous or linear epitope consists of two or more discrete amino acid residues, which are present in a single linear segment of a polypeptide chain. Within the present invention, a “context-dependent” CD3 epitope refers to the conformation of said epitope. Such a context-dependent epitope, localized on the epsilon chain of CD3, can only develop its correct conformation if it is embedded within the rest of the epsilon chain and held in the right position by heterodimerization of the epsilon chain with either CD3 gamma or delta chain. In contrast, a context-independent CD3 epitope as provided herein refers to an N-terminal 1-27 amino acid residue polypeptide or a functional fragment thereof of CD3 epsilon. This N-terminal 1-27 amino acid residue polypeptide or a functional fragment thereof maintains its three-dimensional structural integrity and correct conformation when taken out of its native environment in the CD3 complex. The context-independency of the N-terminal 1-27 amino acid residue polypeptide or a functional fragment thereof, which is part of the extracellular domain of CD3 epsilon, represents, thus, an epitope which is completely different to the epitopes of CD3 epsilon described in connection with a method for the preparation of human binding molecules in WO 2004/106380. Said method used solely expressed recombinant CD3 epsilon. The conformation of this solely expressed recombinant CD3 epsilon differed from that adopted in its natural form, that is, the form in which the CD3 epsilon subunit of the TCR/CD3 complex exists as part of a noncovalent complex with either the CD3 delta or the CD3-gamma subunit of the TCR/CD3 complex. When such solely expressed recombinant CD3 epsilon protein is used as an antigen for selection of antibodies from an antibody library, antibodies specific for this antigen are identified from the library although such a library does not contain antibodies with specificity for self-antigens/autoantigens. This is due to the fact that solely expressed recombinant CD3 epsilon protein does not exist in vivo; it is not an autoantigen. Consequently, subpopulations of B cells expressing antibodies specific for this protein have not been depleted in vivo; an antibody library constructed from such B cells would contain genetic material for antibodies specific for solely expressed recombinant CD3 epsilon protein.

[0101] However, since the context-independent N-terminal 1-27 amino acid residue polypeptide or a functional fragment thereof is an epitope, which folds in its native form, binding domains in line with the present invention cannot be identified by methods based on the approach described in WO 2004/106380. Therefore, it could be verified in tests that binding molecules as disclosed in WO 2004/106380 are not capable of binding to the N-terminal 1-27 amino acid residues of the CD3 epsilon chain. Hence, conventional anti-CD3 binding molecules or anti-CD3 antibody molecules (e.g. as disclosed in WO 99/54440) bind CD3 epsilon chain at a position which is more C-terminally located than the context-independent N-terminal 1-27 amino acid residue polypeptide or a functional fragment provided herein. Prior art antibody molecules OKT3 and UCHT-1 have also a specificity for the epsilon-subunit of the TCR/CD3 complex between amino acid residues 35 to 85 and, accordingly, the epitope of these antibodies is also more C-terminally located. In addition, UCHT-1 binds to the CD3 epsilon chain in a region between amino acid residues 43 to 77 (Tunnacliffe, Int. Immunol. 1 (1989), 546-50; Kjer-Nielsen, PNAS 101, (2004), 7675-7680; Salmeron, J. Immunol. 147 (1991), 3047-52). Therefore, prior art anti-CD3 molecules do not bind to and are not directed against the herein defined context-independent N-terminal 1-27 amino acid residue epitope (or a functional fragment thereof). In particular, the state of the art fails to provide anti-CD3 molecules which specifically binds to the context-independent N-terminal 1-27 amino acid residue epitope and which are cross-species specific, i.e. bind to human and non-chimpanzee primate CD3 epsilon.

[0102] For the generation of a, preferably human, binding domain comprised in a bispecific single chain antibody molecule of the invention, e.g. monoclonal antibodies binding to both the human and non-chimpanzee primate CD3 epsilon (e.g. macaque CD3 epsilon) or monoclonal antibodies binding to the human and/or non-chimpanzee primate PSCA, respectively CD19, C-MET, Endosialin, EpCAM, IGF-1R or FAPα, can be used.

[0103] As used herein, “human” and “man” refers to the species Homo sapiens. As far as the medical uses of the constructs described herein are concerned, human patients are to be treated with the same molecule.

[0104] It is preferred that at least one of said first or second binding domains of the bispecific single chain antibody of the invention is CDR-grafted, humanized or human.

[0105] Preferably, both the first and second binding domains of the bispecific single chain antibody of the invention are CDR-grafted, humanized or human.

[0106] The term “human” antibody as used herein is to be understood as meaning that the bispecific single chain antibody as defined herein, comprises (an) amino acid sequence(s) contained in the human germline antibody repertoire. For the purposes of definition herein, said bispecific single chain antibody may therefore be considered human if it consists of such (a) human germline amino acid sequence(s), i.e. if the amino acid sequence(s) of the bispecific single chain antibody in question is (are) identical to (an) expressed human germline amino acid sequence(s). A bispecific single chain antibody as defined herein may also be regarded as human if it consists of (a) sequence(s) that deviate(s) from its (their) closest human germline sequence(s) by no more than would be expected due to the imprint of somatic hypermutation. Additionally, the antibodies of many non-human mammals, for example rodents such as mice and rats, comprise VH CDR3 amino acid sequences which one may expect to exist in the expressed human antibody repertoire as well. Any such sequence(s) of human or non-human origin which may be expected to exist in the expressed human repertoire would also be considered “human” for the purposes of the present invention.

[0107] As used herein, the term “humanized”, “humanization”, “human-like” or grammatically related variants thereof are used interchangeably to refer to a bispecific single chain antibody comprising in at least one of its binding domains at least one complementarity determining region (“CDR”) from a non-human antibody or fragment thereof. Humanization approaches are described for example in WO 91/09968 and U.S. Pat. No. 6,407,213. As non-limiting examples, the term encompasses the case in which a variable region of at least one binding domain comprises a single CDR region, for example the third CDR region of the VH (CDRH3), from another non-human animal, for example a rodent, as well as the case in which a or both variable region/s comprise at each of their respective first, second and third CDRs the CDRs from said non-human animal. In the event that all CDRs of a binding domain of the bispecific single chain antibody have been replaced by their corresponding equivalents from, for example, a rodent, one typically speaks of “CDR-grafting”, and this term is to be understood as being encompassed by the term “humanized” or grammatically related variants thereof as used herein. The term “humanized” or grammatically related variants thereof also encompasses cases in which, in addition to replacement of one or more CDR regions within a VH and/or VL of the first and/or second binding domain further mutation/s (e.g. substitutions) of at least one single amino acid residue/s within the framework (“FR”) regions between the CDRs has/have been effected such that the amino acids at that/those positions correspond/s to the amino acid/s at that/those position/s in the animal from which the CDR regions used for replacement is/are derived. As is known in the art, such individual mutations are often made in the framework regions following CDR-grafting in order to restore the original binding affinity of the non-human antibody used as a CDR-donor for its target molecule. The term “humanized” may further encompass (an) amino acid substitution(s) in the CDR regions from a non-human animal to the amino acid(s) of a corresponding CDR region from a human antibody, in addition to the amino acid substitutions in the framework regions as described above.

[0108] As used herein, the term “homolog” or “homology” is to be understood as follows: Homology among proteins and DNA is often concluded on the basis of sequence similarity, especially in bioinformatics. For example, in general, if two or more genes have highly similar DNA sequences, it is likely that they are homologous. But sequence similarity may arise from different ancestors: short sequences may be similar by chance, and sequences may be similar because both were selected to bind to a particular protein, such as a transcription factor. Such sequences are similar but not homologous. Sequence regions that are homologous are also called conserved. This is not to be confused with conservation in amino acid sequences in which the amino acid at a specific position has changed but the physio-chemical properties of the amino acid remain unchanged. Homologous sequences are of two types: orthologous and paralogous. Homologous sequences are orthologous if they were separated by a speciation event: when a species diverges into two separate species, the divergent copies of a single gene in the resulting species are said to be orthologous. Orthologs, or orthologous genes, are genes in different species that are similar to each other because they originated from a common ancestor. The strongest evidence that two similar genes are orthologous is the result of a phylogenetic analysis of the gene lineage. Genes that are found within one clade are orthologs, descended from a common ancestor. Orthologs often, but not always, have the same function. Orthologous sequences provide useful information in taxonomic classification studies of organisms. The pattern of genetic divergence can be used to trace the relatedness of organisms. Two organisms that are very closely related are likely to display very similar DNA sequences between two orthologs. Conversely, an organism that is further removed evolutionarily from another organism is likely to display a greater divergence in the sequence of the orthologs being studied. Homologous sequences are paralogous if they were separated by a gene duplication event: if a gene in an organism is duplicated to occupy two different positions in the same genome, then the two copies are paralogous. A set of sequences that are paralogous are called paralogs of each other. Paralogs typically have the same or similar function, but sometimes do not: due to lack of the original selective pressure upon one copy of the duplicated gene, this copy is free to mutate and acquire new functions. An example can be found in rodents such as rats and mice. Rodents have a pair of paralogous insulin genes, although it is unclear if any divergence in function has occurred. Paralogous genes often belong to the same species, but this is not necessary: for example, the hemoglobin gene of humans and the myoglobin gene of chimpanzees are paralogs. This is a common problem in bioinformatics: when genomes of different species have been sequenced and homologous genes have been found, one can not immediately conclude that these genes have the same or similar function, as they could be paralogs whose function has diverged.

[0109] As used herein, a “non-chimpanzee primate” or “non-chimp primate” or grammatical variants thereof refers to any primate animal (i.e. not human) other than chimpanzee, i.e. other than an animal of belonging to the genus Pan, and including the species Pan paniscus and Pan troglodytes, also known as Anthropopithecus troglodytes or Simia satyrus. It will be understood, however, that it is possible that the antibodies of the invention can also bind with their first and/or second binding domain to the respective epitopes/fragments etc. of said chimpanzees. The intention is merely to avoid animal tests which are carried out with chimpanzees, if desired. It is thus also envisaged that in another embodiment the antibodies of the present invention also bind with their first and/or second binding domain to the respective epitopes of chimpanzees. A “primate”, “primate species”, “primates” or grammatical variants thereof denote/s an order of eutherian mammals divided into the two suborders of prosimians and anthropoids and comprising apes, monkeys and lemurs. Specifically, “primates” as used herein comprises the suborder Strepsirrhini (non-tarsier prosimians), including the infraorder Lemuriformes (itself including the superfamilies Cheirogaleoidea and Lemuroidea), the infraorder Chiromyiformes (itself including the family Daubentoniidae) and the infraorder Lorisiformes (itself including the families Lorisidae and Galagidae). “Primates” as used herein also comprises the suborder Haplorrhini, including the infraorder Tarsiiformes (itself including the family Tarsiidae), the infraorder Simiiformes (itself including the Platyrrhini, or New-World monkeys, and the Catarrhini, including the Cercopithecidea, or Old-World Monkeys).

[0110] The non-chimpanzee primate species may be understood within the meaning of the invention to be a lemur, a tarsier, a gibbon, a marmoset (belonging to New-World Monkeys of the family Cebidae) or an Old-World Monkey (belonging to the superfamily Cercopithecoidea).

[0111] As used herein, an “Old-World Monkey” comprises any monkey falling in the superfamily Cercopithecoidea, itself subdivided into the families: the Cercopithecinae, which are mainly African but include the diverse genus of macaques which are Asian and North African; and the Colobinae, which include most of the Asian genera but also the African colobus monkeys.

[0112] Specifically, within the subfamily Cercopithecinae, an advantageous non-chimpanzee primate may be from the Tribe Cercopithecini, within the genus Allenopithecus (Allen's Swamp Monkey, Allenopithecus nigroviridis); within the genus Miopithecus (Angolan Talapoin, Miopithecus talapoin; Gabon Talapoin, Miopithecus ogouensis); within the genus Erythrocebus (Patas Monkey, Erythrocebus patas); within the genus Chlorocebus (Green Monkey, Chlorocebus sabaceus; Grivet, Chlorocebus aethiops; Bale Mountains Vervet, Chlorocebus djamdjamensis; Tantalus Monkey, Chlorocebus tantalus; Vervet Monkey, Chlorocebus pygerythrus; Malbrouck, Chlorocebus cynosuros); or within the genus Cercopithecus (Dryas Monkey or Salongo Monkey, Cercopithecus dryas; Diana Monkey, Cercopithecus diana; Roloway Monkey, Cercopithecus roloway; Greater Spot-nosed Monkey, Cercopithecus nictitans; Blue Monkey, Cercopithecus mitis; Silver Monkey, Cercopithecus doggetti; Golden Monkey, Cercopithecus kandti; Sykes's Monkey, Cercopithecus albogularis; Mona Monkey, Cercopithecus mona; Campbell's Mona Monkey, Cercopithecus campbelli; Lowe's Mona Monkey, Cercopithecus lowei; Crested Mona Monkey, Cercopithecus pogonias; Wolf's Mona Monkey, Cercopithecus wolfi; Dent's Mona Monkey, Cercopithecus denti; Lesser Spot-nosed Monkey, Cercopithecus petaurista; White-throated Guenon, Cercopithecus erythrogaster; Sclater's Guenon, Cercopithecus sclateri; Red-eared Guenon, Cercopithecus erythrotis; Moustached Guenon, Cercopithecus cephus; Red-tailed Monkey, Cercopithecus ascanius; L'Hoest's Monkey, Cercopithecus Ihoesti; Preuss's Monkey, Cercopithecus preussi; Sun-tailed Monkey, Cercopithecus solatus; Hamlyn's Monkey or Owl-faced Monkey, Cercopithecus hamlyni; De Brazza's Monkey, Cercopithecus neglectus).

[0113] Alternatively, an advantageous non-chimpanzee primate, also within the subfamily Cercopithecinae but within the Tribe Papionini, may be from within the genus Macaca (Barbary Macaque, Macaca sylvanus; Lion-tailed Macaque, Macaca silenus; Southern Pig-tailed Macaque or Beruk, Macaca nemestrina; Northern Pig-tailed Macaque, Macaca leonina; Pagai Island Macaque or Bokkoi, Macaca pagensis; Siberut Macaque, Macaca siberu; Moor Macaque, Macaca maura; Booted Macaque, Macaca ochreata; Tonkean Macaque, Macaca tonkeana; Heck's Macaque, Macaca hecki; Gorontalo Macaque, Macaca nigriscens; Celebes Crested Macaque or Black “Ape”, Macaca nigra; Cynomolgus monkey or Crab-eating Macaque or Long-tailed Macaque or Kera, Macaca fascicularis; Stump-tailed Macaque or Bear Macaque, Macaca arctoides; Rhesus Macaque, Macaca mulatta; Formosan Rock Macaque, Macaca cyclopis; Japanese Macaque, Macaca fuscata; Toque Macaque, Macaca sinica; Bonnet Macaque, Macaca radiata; Barbary Macaque, Macaca sylvanmus; Assam Macaque, Macaca assamensis; Tibetan Macaque or Milne-Edwards' Macaque, Macaca thibetana; Arunachal Macaque or Munzala, Macaca munzala); within the genus Lophocebus (Gray-cheeked Mangabey, Lophocebus albigena; Lophocebus albigena albigena; Lophocebus albigena osmani; Lophocebus albigena johnstoni; Black Crested Mangabey, Lophocebus aterrimus; Opdenbosch's Mangabey, Lophocebus opdenboschi; Highland Mangabey, Lophocebus kipunji); within the genus Papio (Hamadryas Baboon, Papio hamadryas; Guinea Baboon, Papio papio; Olive Baboon, Papio anubis; Yellow Baboon, Papio cynocephalus; Chacma Baboon, Papio ursinus); within the genus Theropithecus (Gelada, Theropithecus gelada); within the genus Cercocebus (Sooty Mangabey, Cercocebus atys; Cercocebus atys atys; Cercocebus atys lunulatus; Collared Mangabey, Cercocebus torquatus; Agile Mangabey, Cercocebus agilis; Golden-bellied Mangabey, Cercocebus chrysogaster; Tana River Mangabey, Cercocebus galeritus; Sanje Mangabey, Cercocebus sanjei); or within the genus Mandrillus (Mandrill, Mandrillus sphinx; Drill, Mandrillus leucophaeus).

[0114] Most preferred is Macaca fascicularis (also known as Cynomolgus monkey and, therefore, in the Examples named “Cynomolgus”) and Macaca mulatta (rhesus monkey, named “rhesus”).

[0115] Within the subfamily Colobinae, an advantageous non-chimpanzee primate may be from the African group, within the genus Colobus (Black Colobus, Colobus satanas; Angola Colobus, Colobus angolensis; King Colobus, Colobus polykomos; Ursine Colobus, Colobus vellerosus; Mantled Guereza, Colobus guereza); within the genus Piliocolobus (Western Red Colobus, Piliocolobus badius; Piliocolobus badius badius; Piliocolobus badius temminckii; Piliocolobus badius waldronae; Pennant's Colobus, Piliocolobus pennantii; Piliocolobus pennantii pennantii; Piliocolobus pennantii epieni; Piliocolobus pennantil bouvieri; Preuss's Red Colobus, Piliocolobus preussi; Thollon's Red Colobus, Piliocolobus tholloni; Central African Red Colobus, Piliocolobus foai; Piliocolobus foai foai; Piliocolobus foai ellioti; Piliocolobus foai oustaleti; Piliocolobus foai semlikiensis; Piliocolobus foai parmentierorum; Ugandan Red Colobus, Piliocolobus tephrosceles; Uzyngwa Red Colobus, Piliocolobus gordonorum; Zanzibar Red Colobus, Piliocolobus kirkii; Tana River Red Colobus, Piliocolobus rufomitratus); or within the genus Procolobus (Olive Colobus, Procolobus verus).

[0116] Within the subfamily Colobinae, an advantageous non-chimpanzee primate may alternatively be from the Langur (leaf monkey) group, within the genus Semnopithecus (Nepal Gray Langur, Semnopithecus schistaceus; Kashmir Gray Langur, Semnopithecus ajax; Tarai Gray Langur, Semnopithecus hector; Northern Plains Gray Langur, Semnopithecus entellus; Black-footed Gray Langur, Semnopithecus hypoleucos; Southern Plains Gray Langur, Semnopithecus dussumieri; Tufted Gray Langur, Semnopithecus priam); within the T. vetulus group or the genus Trachypithecus (Purple-faced Langur, Trachypithecus vetulus; Nilgiri Langur, Trachypithecus johnii); within the T. cristatus group of the genus Trachypithecus (Javan Lutung, Trachypithecus auratus; Silvery Leaf Monkey or Silvery Lutung, Trachypithecus cristatus; Indochinese Lutung, Trachypithecus germaini; Tenasserim Lutung, Trachypithecus barbel); within the T. obscurus group of the genus Trachypithecus (Dusky Leaf Monkey or Spectacled Leaf Monkey, Trachypithecus obscurus; Phayre's Leaf Monkey, Trachypithecus phayrei); within the T. pileatus group of the genus Trachypithecus (Capped Langur, Trachypithecus pileatus; Shortridge's Langur, Trachypithecus shortridgei; Gee's Golden Langur, Trachypithecus geei); within the T. francoisi group of the genus Trachypithecus (Francois' Langur, Trachypithecus francoisi; Hatinh Langur, Trachypithecus hatinhensis; White-headed Langur, Trachypithecus poliocephalus; Laotian Langur, Trachypithecus laotum; Delacour's Langur, Trachypithecus delacouri; Indochinese Black Langur, Trachypithecus ebenus); or within the genus Presbytis (Sumatran Surili, Presbytis melalophos; Banded Surili, Presbytis femoralis; Sarawak Surili, Presbytis chrysomelas; White-thighed Surili, Presbytis siamensis; White-fronted Surili, Presbytis frontata; Javan Surili, Presbytis comata; Thomas's Langur, Presbytis thomasi; Hose's Langur, Presbytis hosei; Maroon Leaf Monkey, Presbytis rubicunda; Mentawai Langur or Joja, Presbytis potenziani; Natuna Island Surili, Presbytis natunae).

[0117] Within the subfamily Colobinae, an advantageous non-chimpanzee primate may alternatively be from the Odd-Nosed group, within the genus Pygathrix (Red-shanked Douc, Pygathrix nemaeus; Black-shanked Douc, Pygathrix nigripes; Gray-shanked Douc, Pygathrix cinerea); within the genus Rhinopithecus (Golden Snub-nosed Monkey, Rhinopithecus roxellana; Black Snub-nosed Monkey, Rhinopithecus bieti; Gray Snub-nosed Monkey, Rhinopithecus brelichi; Tonkin Snub-nosed Langur, Rhinopithecus avunculus); within the genus Nasalis (Proboscis Monkey, Nasalis larvatus); or within the genus Simias (Pig-tailed Langur, Simias concolor).

[0118] As used herein, the term “marmoset” denotes any New-World Monkeys of the genus Callithrix, for example belonging to the Atlantic marmosets of subgenus Callithrix (sic!) (Common Marmoset, Callithrix (Callithrix) jacchus; Black-tufted Marmoset, Callithrix (Callithrix) penicillata; Wied's Marmoset, Callithrix (Callithrix) kuhlii; White-headed Marmoset, Callithrix (Callithrix) geoffroyi; Buffy-headed Marmoset, Callithrix (Callithrix) flaviceps; Buffy-tufted Marmoset, Callithrix (Callithrix) aurita); belonging to the Amazonian marmosets of subgenus Mico (Rio Acari Marmoset, Callithrix (Mico) acariensis; Manicore Marmoset, Callithrix (Mico) manicorensis; Silvery Marmoset, Callithrix (Mico) argentata; White Marmoset, Callithrix (Mico) leucippe; Emilia's Marmoset, Callithrix (Mico) emiliae; Black-headed Marmoset, Callithrix (Mico) nigriceps; Marca's Marmoset, Callithrix (Mico)marcai; Black-tailed Marmoset, Callithrix (Mico) melanura; Santarem Marmoset, Callithrix (Mico) humeralifera; Maués Marmoset, Callithrix (Mico) mauesi; Gold-and-white Marmoset, Callithrix (Mico) chrysoleuca; Hershkovitz's Marmoset, Callithrix (Mico) intermedia; Satéré Marmoset, Callithrix (Mico) saterei); Roosmalens' Dwarf Marmoset belonging to the subgenus Callibella (Callithrix (Callibella) humilis); or the Pygmy Marmoset belonging to the subgenus Cebuella (Callithrix (Cebuella) pygmaea).

[0119] Other genera of the New-World Monkeys comprise tamarins of the genus Saguinus (comprising the S. oedipus-group, the S. midas group, the S. nigricollis group, the S. mystax group, the S. bicolor group and the S. inustus group) and squirrel monkeys of the genus Samiri (e.g. Saimiri sciureus, Saimiri oerstedii, Saimiri ustus, Saimiri boliviensis, Saimiri vanzolini)

[0120] In a preferred embodiment of the bispecific single chain antibody molecule of the invention, the non-chimpanzee primate is an old world monkey. In a more preferred embodiment of the polypeptide, the old world monkey is a monkey of the Papio genus Macaque genus. Most preferably, the monkey of the Macaque genus is Assamese macaque (Macaca assamensis), Barbary macaque (Macaca sylvanus), Bonnet macaque (Macaca radiata), Booted or Sulawesi-Booted macaque (Macaca ochreata), Sulawesi-crested macaque (Macaca nigra), Formosan rock macaque (Macaca cyclopsis), Japanese snow macaque or Japanese macaque (Macaca fuscata), Cynomologus monkey or crab-eating macaque or long-tailed macaque or Java macaque (Macaca fascicularis), Lion-tailed macaque (Macaca silenus), Pigtailed macaque (Macaca nemestrina), Rhesus macaque (Macaca mulatta), Tibetan macaque (Macaca thibetana), Tonkean macaque (Macaca tonkeana), Toque macaque (Macaca sinica), Stump-tailed macaque or Red-faced macaque or Bear monkey (Macaca arctoides), or Moor macaque (Macaca maurus). Most preferably, the monkey of the Papio genus is Hamadryas Baboon, Papio hamadryas; Guinea Baboon, Papio papio; Olive Baboon, Papio anubis; Yellow Baboon, Papio cynocephalus; Chacma Baboon, Papio ursinus.

[0121] In an alternatively preferred embodiment of the bispecific single chain antibody molecule of the invention, the non-chimpanzee primate is a new world monkey. In a more preferred embodiment of the polypeptide, the new world monkey is a monkey of the Callithrix genus (marmoset), the Saguinus genus or the Samiri genus. Most preferably, the monkey of the Callithrix genus is Callithrix jacchus, the monkey of the Saguinus genus is Saguinus oedipus and the monkey of the Samiri genus is Saimiri sciureus.

[0122] The term “cell surface antigen” as used herein denotes a molecule, which is displayed on the surface of a cell. In most cases, this molecule will be located in or on the plasma membrane of the cell such that at least part of this molecule remains accessible from outside the cell in tertiary form. A non-limiting example of a cell surface molecule, which is located in the plasma membrane is a transmembrane protein comprising, in its tertiary conformation, regions of hydrophilicity and hydrophobicity. Here, at least one hydrophobic region allows the cell surface molecule to be embedded, or inserted in the hydrophobic plasma membrane of the cell while the hydrophilic regions extend on either side of the plasma membrane into the cytoplasm and extracellular space, respectively. Non-limiting examples of cell surface molecules which are located on the plasma membrane are proteins which have been modified at a cysteine residue to bear a palmitoyl group, proteins modified at a C-terminal cysteine residue to bear a farnesyl group or proteins which have been modified at the C-terminus to bear a glycosyl phosphatidyl inositol (“GPI”) anchor. These groups allow covalent attachment of proteins to the outer surface of the plasma membrane, where they remain accessible for recognition by extracellular molecules such as antibodies. Examples of cell surface antigens are CD3 epsilon and PSCA, respectively CD19, C-MET, Endosialin, EpCAM, IGF-1R or FAPα.

[0123] As described herein above, PSCA is a cell surface antigen which is a target for therapy of various cancers, including, but not limited to prostate cancer, bladder cancer or pancreatic cancer.

[0124] As also described herein above, CD19 is a cell surface antigen which is a target for therapy of various cancers, including, but not limited to B-cell malignancies such as non-Hodgkin Lymphoma, B-cell mediated autoimmune diseases or the depletion of B-cells.

[0125] As further described herein above, C-MET is a cell surface antigen which is a target for therapy of various cancers, including, but not limited to carcinomas, sarcomas, glioblastomas/astrocytomas, melanomas, mesotheliomas, Wilms tumors or hematopoietic malignancies such as leukemias, lymphomas or multiple myelomas. Moreover, as described herein above, Endosialin is a cell surface antigen which is a target for therapy of various cancers, including, but not limited to carcinomas (breast, kidney, lung, colorectal, colon, pancreas mesothelioma), sarcomas, and neuroectodermal tumors (melanoma, glioma, neuroblastoma).

[0126] As also described herein above, EpCAM is a cell surface antigen which is a target for therapy of various cancers, including, but not limited to epithelial cancer or a minimal residual cancer.

[0127] Furthermore, as described herein above, FAP alpha is a cell surface antigen which is a target for therapy of various cancers, including, but not limited to, epithelial cancer.

[0128] Moreover, as described herein above, IGF-1R is a cell surface antigen which is a target for therapy of various cancers, including, but not limited to, bone or soft tissue cancer (e.g. Ewing sarcoma), breast, liver, lung, head and neck, colorectal, prostate, leiomyosarcoma, cervical and endometrial cancer, ovarian, prostate, and pancreatic cancer, and autoimmune diseases, including, but not limited to, preferably psoriasis.

[0129] In light of this, PSCA, respectively CD19, C-MET, Endosialin, EpCAM, IGF-1R or FAPα can also be characterized as a tumor antigen. The term “tumor antigen” as used herein may be understood as those antigens that are presented on tumor cells. These antigens can be presented on the cell surface with an extracellular part, which is often combined with a transmembrane and cytoplasmic part of the molecule. These antigens can sometimes be presented only by tumor cells and never by the normal ones. Tumor antigens can be exclusively expressed on tumor cells or might represent a tumor specific mutation compared to normal cells. In this case, they are called tumor-specific antigens. More common are antigens that are presented by tumor cells and normal cells, and they are called tumor-associated antigens. These tumor-associated antigens can be overexpressed compared to normal cells or are accessible for antibody binding in tumor cells due to the less compact structure of the tumor tissue compared to normal tissue. Example for tumor antigens in line with the present invention are PSCA, CD19, C-MET, Endosialin, EpCAM, IGF-1R and FAPα.

[0130] As described herein above the bispecific single chain antibody molecule of the invention binds with the first binding domain to an epitope of human and non-chimpanzee primate CD3ε (epsilon) chain, wherein the epitope is part of an amino acid sequence comprised in the group consisting of 27 amino acid residues as depicted in SEQ ID NOs. 2, 4, 6, or 8 or a functional fragment thereof.

[0131] In line with the present invention it is preferred for the bispecific single chain antibody molecule of the invention that said epitope is part of an amino acid sequence comprising 26, 25, 24, 23, 22, 21, 20, 19, 18, 17, 16, 15, 14, 13, 12, 11, 10, 9, 8, 7, 6 or 5 amino acids.

[0132] More preferably, wherein said epitope comprises at least the amino acid sequence Gin-Asp-Gly-Asn-Glu (Q-D-G-N-E).

[0133] Within the present invention, a functional fragment of the N-terminal 1-27 amino acid residues means that said functional fragment is still a context-independent epitope maintaining its three-dimensional structural integrity when taken out of its native environment in the CD3 complex (and fused to a heterologous amino acid sequence such as EpCAM or an immunoglobulin Fc part, e.g. as shown in Example 3.1). The maintenance of the three-dimensional structure within the 27 amino acid N-terminal polypeptide or functional fragment thereof of CD3 epsilon can be used for the generation of binding domains which bind to the N-terminal CD3 epsilon polypeptide fragment in vitro and to the native (CD3 epsilon subunit of the) CD3 complex on T cells in vivo with the same binding affinity. Within the present invention, a functional fragment of the N-terminal 1-27 amino acid residues means that CD3 binding domains provided herein can still bind to such functional fragments in a context-independent manner. The person skilled in the art is aware of methods for epitope mapping to determine which amino acid residues of an epitope are recognized by such anti-CD3 binding domains (e.g. alanine scanning; see appended examples).

[0134] In one embodiment of the invention, the bispecific single chain antibody molecule of the invention comprises a (first) binding domain capable of binding to an epitope of human and non-chimpanzee primate CD3ε chain and a second binding domain capable of binding to the cell surface antigen PSCA. In alternative embodiments of the invention the said secong binding domain capable of binding to the cell surface antigen CD19, C-MET, Endosialin, EpCAM, IGF-1R or FAPα Within the present invention it is further preferred that the second binding domain binds to the human cell surface antigen PSCA, respectively CD19, C-MET, Endosialin, EpCAM, IGF-1R or FAPα and/or a non-chimpanzee primate PSCA, respectively CD19, C-MET, Endosialin, EpCAM, IGF-1R or FAPα. Particularly preferred, the second binding domain binds to the human cell surface antigen PSCA, respectively CD19, C-MET, Endosialin, EpCAM, IGF-1R or FAPα and a non-chimpanzee primate PSCA, respectively CD19, C-MET, Endosialin, EpCAM, IGF-1R or FAPα, preferably a macaque PSCA, respectively CD19, C-MET, Endosialin, EpCAM, IGF-1R or FAPα. It is to be understood, that the second binding domain binds to at least one non-chimpanzee primate PSCA, respectively CD19, C-MET, Endosialin, EpCAM, IGF-1R or FAPα, however, it may also bind to two, three or more, non-chimpanzee primate PSCA homologs, respectively CD19 homologs, C-MET homologs, Endosialin homologs, EpCAM homologs, IGF-1R homologs or FAPα homologs. For example, the second binding domain may bind to the Cynomogus monkey PSCA, respectively CD19, C-MET, Endosialin, EpCAM, IGF-1R or FAPα, and to the Rhesus monkey PSCA, respectively CD19, C-MET, Endosialin, EpCAM, IGF-1R or FAPα.

[0135] For the generation of the second binding domain of the bispecific single chain antibody molecule of the invention, e.g. bispecific single chain antibodies as defined herein, monoclonal antibodies binding to both of the respective human and/or non-chimpanzee primate cell surface antigen such as PSCA, respectively CD19, C-MET, Endosialin, EpCAM, IGF-1R or FAPα, can be utilized. Appropriate binding domains for the bispecific polypeptide as defined herein e.g. can be derived from cross-species specific monoclonal antibodies by recombinant methods described in the art.

[0136] A monoclonal antibody binding to a human cell surface antigen and to the homolog of said cell surface antigen in a non-chimpanzee primate can be tested by FACS assays as set forth above. It is evident to those skilled in the art that cross-species specific antibodies can also be generated by hybridoma techniques described in the literature (Milstein and Köhler, Nature 256 (1975), 495-7). For example, mice may be alternately immunized with human and non-chimpanzee primate cell surface antigen, such as PSCA, respectively CD19, C-MET, Endosialin, EpCAM, IGF-1R or FAPα.

[0137] From these mice, cross-species specific antibody-producing hybridoma cells are isolated via hybridoma technology and analysed by FACS as set forth above. The generation and analysis of bispecific polypeptides such as bispecific single chain antibodies exhibiting cross-species specificity as described herein is shown in the following examples. The advantages of the bispecific single chain antibodies exhibiting cross-species specificity include the points enumerated herein.

[0138] It is particularly preferred for the bispecific single chain antibody molecule of the invention that the first binding domain capable of binding to an epitope of human and non-chimpanzee primate CD3ε chain comprises a VL region comprising CDR-L1, CDR-L2 and CDR-L3 selected from:
[0139] (a) CDR-L1 as depicted in SEQ ID NO. 27, CDR-L2 as depicted in SEQ ID NO. 28 and CDR-L3 as depicted in SEQ ID NO. 29;
[0140] (b) CDR-L1 as depicted in SEQ ID NO. 117, CDR-L2 as depicted in SEQ ID NO. 118 and CDR-L3 as depicted in SEQ ID NO. 119; and
[0141] (c) CDR-L1 as depicted in SEQ ID NO. 153, CDR-L2 as depicted in SEQ ID NO. 154 and CDR-L3 as depicted in SEQ ID NO. 155.

[0142] The variable regions, i.e. the variable light chain (“L” or “VL”) and the variable heavy chain (“H” or “VH”) are understood in the art to provide the binding domain of an antibody. This variable regions harbor the complementary determining regions.

[0143] The term “complementary determining region” (CDR) is well known in the art to dictate the antigen specificity of an antibody. The term “CDR-L” or “L CDR” or “LCDR” refers to CDRs in the VL, whereas the term “CDR-H” or “H CDR” or “HCDR” refers to the CDRs in the VH.

[0144] In an alternatively preferred embodiment of the bispecific single chain antibody molecule of the invention the first binding domain capable of binding to an epitope of human and non-chimpanzee primate CD3ε chain comprises a VH region comprising CDR-H 1, CDR-H2 and CDR-H3 selected from:
[0145] (a) CDR-H1 as depicted in SEQ ID NO. 12, CDR-H2 as depicted in SEQ ID NO. 13 and CDR-H3 as depicted in SEQ ID NO. 14;
[0146] (b) CDR-H1 as depicted in SEQ ID NO. 30, CDR-H2 as depicted in SEQ ID NO. 31 and CDR-H3 as depicted in SEQ ID NO. 32;
[0147] (c) CDR-H1 as depicted in SEQ ID NO. 48, CDR-H2 as depicted in SEQ ID NO. 49 and CDR-H3 as depicted in SEQ ID NO. 50;
[0148] (d) CDR-H1 as depicted in SEQ ID NO. 66, CDR-H2 as depicted in SEQ ID NO. 67 and CDR-H3 as depicted in SEQ ID NO. 68;
[0149] (e) CDR-H1 as depicted in SEQ ID NO. 84, CDR-H2 as depicted in SEQ ID NO. 85 and CDR-H3 as depicted in SEQ ID NO. 86;
[0150] (f) CDR-H1 as depicted in SEQ ID NO. 102, CDR-H2 as depicted in SEQ ID NO. 103 and CDR-H3 as depicted in SEQ ID NO. 104;
[0151] (g) CDR-H1 as depicted in SEQ ID NO. 120, CDR-H2 as depicted in SEQ ID NO. 121 and CDR-H3 as depicted in SEQ ID NO. 122;
[0152] (h) CDR-H1 as depicted in SEQ ID NO. 138, CDR-H2 as depicted in SEQ ID NO. 139 and CDR-H3 as depicted in SEQ ID NO. 140;
[0153] (i) CDR-H1 as depicted in SEQ ID NO. 156, CDR-H2 as depicted in SEQ ID NO. 157 and CDR-H3 as depicted in SEQ ID NO. 158; and
[0154] (j) CDR-H1 as depicted in SEQ ID NO. 174, CDR-H2 as depicted in SEQ ID NO. 175 and CDR-H3 as depicted in SEQ ID NO. 176.

[0155] It is further preferred that the binding domain capable of binding to an epitope of human and non-chimpanzee primate CD3ε chain comprises a VL region selected from the group consisting of a VL region as depicted in SEQ ID NO. 35, 39, 125, 129, 161 or 165.

[0156] It is alternatively preferred that the first binding domain capable of binding to an epitope of human and non-chimpanzee primate CD3ε chain comprises a VH region selected from the group consisting of a VH region as depicted in SEQ ID NO. 15, 19, 33, 37, 51, 55, 69, 73, 87, 91, 105, 109, 123, 127, 141, 145, 159, 163, 177 or 181.

[0157] More preferably, the bispecific single chain antibody molecule of the invention is characterized by the first binding domain capable of binding to an epitope of human and non-chimpanzee primate CD3ε chain, which comprises a VL region and a VH region selected from the group consisting of:
[0158] (a) a VL region as depicted in SEQ ID NO. 17 or 21 and a VH region as depicted in SEQ ID NO. 15 or 19;
[0159] (b) a VL region as depicted in SEQ ID NO. 35 or 39 and a VH region as depicted in SEQ ID NO. 33 or 37;
[0160] (c) a VL region as depicted in SEQ ID NO. 53 or 57 and a VH region as depicted in SEQ ID NO. 51 or 55;
[0161] (d) a VL region as depicted in SEQ ID NO. 71 or 75 and a VH region as depicted in SEQ ID NO. 69 or 73;
[0162] (e) a VL region as depicted in SEQ ID NO. 89 or 93 and a VH region as depicted in SEQ ID NO. 87 or 91;
[0163] (f) a VL region as depicted in SEQ ID NO. 107 or 111 and a VH region as depicted in SEQ ID NO. 105 or 109;
[0164] (g) a VL region as depicted in SEQ ID NO. 125 or 129 and a VH region as depicted in SEQ ID NO. 123 or 127;
[0165] (h) a VL region as depicted in SEQ ID NO. 143 or 147 and a VH region as depicted in SEQ ID NO. 141 or 145;
[0166] (i) a VL region as depicted in SEQ ID NO. 161 or 165 and a VH region as depicted in SEQ ID NO. 159 or 163; and
[0167] (j) a VL region as depicted in SEQ ID NO. 179 or 183 and a VH region as depicted in SEQ ID NO. 177 or 181.

[0168] According to a preferred embodiment of the bispecific single chain antibody molecule of the invention the pairs of VH-regions and VL-regions in the first binding domain binding to CD3 epsilon are in the format of a single chain antibody (scFv). The VH and VL regions are arranged in the order VH-VL or VL-VH. It is preferred that the VH-region is positioned N-terminally to a linker sequence. The VL-region is positioned C-terminally of the linker sequence. Put in other words, the domain arrangement in the CD3 binding domain of the bispecific single chain antibody molecule of the invention is preferably VH-VL, with said CD3 binding domain located C-terminally to the second (cell surface antigen, such as PSCA, CD19, C-MET, Endosialin, EpCAM, IGF-1R or FAPα) binding domain. Preferably the VH-VL comprises or is SEQ ID NO. 185.

[0169] A preferred embodiment of the above described bispecific single chain antibody molecule of the invention is characterized by the first binding domain capable of binding to an epitope of human and non-chimpanzee primate CD3ε chain comprising an amino acid sequence selected from the group consisting of SEQ ID NOs: 23, 25, 41, 43, 59, 61, 77, 79, 95, 97, 113, 115, 131, 133, 149, 151, 167, 169, 185 or 187.

[0170] The invention further relates to an above described bispecific single chain antibody, wherein the second binding domain binds to the cell surface antigen PSCA, CD19, C-MET, Endosialin, EpCAM, IGF-1R or FAPα.

### PSCA×CD3

[0171] According to a preferred embodiment of the invention an above characterized bispecific single chain antibody molecule comprises a group of the following sequences as CDR H1, CDR H2, CDR H3, CDR L1, CDR L2 and CDR L3 in the second binding domain selected from the group consisting of:
[0172] a) CDR H1-3 of SEQ ID NO: 382-384 and CDR L1-3 of SEQ ID NO: 377 379;
[0173] b) CDR H1-3 of SEQ ID NO: 400-402 and CDR L1-3 of SEQ ID NO: 395 397;
[0174] c) CDR H1-3 of SEQ ID NO: 414-416 and CDR L1-3 of SEQ ID NO: 409 411;
[0175] d) CDR H1-3 of SEQ ID NO: 432-434 and CDR L1-3 of SEQ ID NO: 427 429;
[0176] e) CDR H1-3 of SEQ ID NO: 1215-1217 and CDR L1-3 of SEQ ID NO: 1220 1222;
[0177] f) CDR H1-3 of SEQ ID NO: 1187-1189 and CDR L1-3 of SEQ ID NO: 1192 1194;
[0178] g) CDR H1-3 of SEQ ID NO: 1173-1175 and CDR L1-3 of SEQ ID NO: 1178 1180;
[0179] h) CDR H1-3 of SEQ ID NO: 1229-1231 and CDR L1-3 of SEQ ID NO: 1234 1236;
[0180] i) CDR H1-3 of SEQ ID NO: 1201-1203 and CDR L1-3 of SEQ ID NO: 1206 1208;
[0181] k) CDR H1-3 of SEQ ID NO: 1257-1259 and CDR L1-3 of SEQ ID NO: 1262 1264; and
[0182] 1) CDR H1-3 of SEQ ID NO: 1243-1245 and CDR L1-3 of SEQ ID NO: 1248-1250.

[0183] The sequences of the corresponding VL- and VH-regions of the second binding domain of the bispecific single chain antibody molecule of the invention as well as of the respective scFvs are shown in the sequence listing.

[0184] In the bispecific single chain antibody molecule of the invention the binding domains are arranged in the order VL-VH-VH-VL, VL-VH-VL-VH, VH-VL-VH-VL or VH-VL-VL-VH, as exemplified in the appended examples. Preferably, the binding domains are arranged in the order VH PSCA-VL PSCA-VH CD3-VL CD3 or VL PSCA-VH PSCA-VH CD3-VL CD3.

[0185] A particularly preferred embodiment of the invention concerns an above characterized polypeptide, wherein the bispecific single chain antibody molecule comprises a sequence selected from:
[0186] (a) an amino acid sequence as depicted in any of SEQ ID NOs: 389, 421, 439, 391, 405, 423, 441, 1226, 1198, 1184, 1240, 1212, 1268 or 1254
[0187] (b) an amino acid sequence encoded by a nucleic acid sequence as depicted in any of SEQ ID NOs: 390, 422, 440, 392, 406, 424, 442, 1227, 1199, 1185, 1241, 1213, 1269 or 1255; and
[0188] (c) an amino acid sequence at least 90% identical, more preferred at least 95% identical, most preferred at least 96% identical to the amino acid sequence of (a) or (b).

[0189] The invention relates to a bispecific single chain antibody molecule comprising an amino acid sequence as depicted in any of SEQ ID NOs: 389, 421, 439, 391, 405, 423, 441, 1226, 1198, 1184, 1240, 1212, 1268 or 1254, as well as to an amino acid sequences at least 85% identical, preferably 90%, more preferred at least 95% identical, most preferred at least 96, 97, 98, or 99% identical to the amino acid sequence of SEQ ID NOs: 389, 421, 439, 391, 405, 423, 441, 1226, 1198, 1184, 1240, 1212, 1268 or 1254. The invention relates also to the corresponding nucleic acid sequences as depicted in any of SEQ ID NOs: 390, 422, 440, 392, 406, 424, 442, 1227, 1199, 1185, 1241, 1213, 1269 or 1255 as well as to nucleic acid sequences at least 85% identical, preferably 90%, more preferred at least 95% identical, most preferred at least 96, 97, 98, or 99% identical to the nucleic acid sequences shown in SEQ ID NOs: 390, 422, 440, 392, 406, 424, 442, 1227, 1199, 1185, 1241, 1213, 1269 or 1255. It is to be understood that the sequence identity is determined over the entire nucleotide or amino acid sequence. For sequence alignments, for example, the programs Gap or BestFit can be used (Needleman and Wunsch J. Mol. Biol. 48 (1970), 443-453; Smith and Waterman, Adv. Appl. Math 2 (1981), 482-489), which is contained in the GCG software package (Genetics Computer Group, 575 Science Drive, Madison, Wisconsin, USA 53711 (1991). It is a routine method for those skilled in the art to determine and identify a nucleotide or amino acid sequence having e.g. 85% (90%, 95%, 96%, 97%, 98% or 99%) sequence identity to the nucleotide or amino acid sequences of the bispecific single single chain antibody of the invention. For example, according to Crick's Wobble hypothesis, the 5′ base on the anti-codon is not as spatially confined as the other two bases, and could thus have non-standard base pairing. Put in other words: the third position in a codon triplet may vary so that two triplets which differ in this third position may encode the same amino acid residue. Said hypothesis is well known to the person skilled in the art (see e.g. http://en.wikipedia.org/wiki/Wobble_Hypothesis; Crick, J Mol Biol 19 (1966): 548-55).

[0190] Preferred domain arrangements in the PSCA×CD3 bispecific single chain antibody constructs of the invention are shown in the following examples.

[0191] In a preferred embodiment of the invention, the bispecific single chain antibodies are cross-species specific for CD3 epsilon and for the human and non-chimpanzee primate cell surface antigen PSCA recognized by their second binding domain.

### CD19×CD3

[0192] According to an alternatively preferred embodiment of the invention an above characterized bispecific single chain antibody molecule comprises a group of the following sequences as CDR H1, CDR H2, CDR H3, CDR L1, CDR L2 and CDR L3 in the second binding domain selected from the group consisting of:
[0193] a) CDR H1-3 of SEQ ID NO: 478-480 and CDR L1-3 of SEQ ID NO: 473 475;
[0194] b) CDR H1-3 of SEQ ID NO: 530-532 and CDR L1-3 of SEQ ID NO: 525 527;
[0195] c) CDR H1-3 of SEQ ID NO: 518-520 and CDR L1-3 of SEQ ID NO: 513 515;
[0196] d) CDR H1-3 of SEQ ID NO: 506-508 and CDR L1-3 of SEQ ID NO: 501 503;
[0197] e) CDR H1-3 of SEQ ID NO: 494-496 and CDR L1-3 of SEQ ID NO: 489 491;
[0198] f) CDR H1-3 of SEQ ID NO: 542-544 and CDR L1-3 of SEQ ID NO: 537-539;
[0199] g) CDR H1-3 of SEQ ID NO: 554-556 and CDR L1-3 of SEQ ID NO: 549 551;
[0200] h) CDR H1-3 of SEQ ID NO: 566-568 and CDR L1-3 of SEQ ID NO: 561 563;
[0201] i) CDR H1-3 of SEQ ID NO: 578-580 and CDR L1-3 of SEQ ID NO: 573 575;
[0202] j) CDR H1-3 of SEQ ID NO: 590-592 and CDR L1-3 of SEQ ID NO: 585 587;
[0203] k) CDR H1-3 of SEQ ID NO: 602-604 and CDR L1-3 of SEQ ID NO: 597 599;
[0204] l) CDR H1-3 of SEQ ID NO: 614-616 and CDR L1-3 of SEQ ID NO: 609 611;
[0205] m) CDR H1-3 of SEQ ID NO: 626-628 and CDR L1-3 of SEQ ID NO: 621 623;
[0206] n) CDR H1-3 of SEQ ID NO: 638-640 and CDR L1-3 of SEQ ID NO: 633 635;
[0207] o) CDR H1-3 of SEQ ID NO: 650-652 and CDR L1-3 of SEQ ID NO: 645 647;
[0208] p) CDR H1-3 of SEQ ID NO: 662-664 and CDR L1-3 of SEQ ID NO: 657 659;
[0209] q) CDR H1-3 of SEQ ID NO: 674-676 and CDR L1-3 of SEQ ID NO: 669 671;
[0210] r) CDR H1-3 of SEQ ID NO: 686-688 and CDR L1-3 of SEQ ID NO: 681 683;
[0211] s) CDR H1-3 of SEQ ID NO: 698-700 and CDR L1-3 of SEQ ID NO: 693 695;
[0212] t) CDR H1-3 of SEQ ID NO: 710-712 and CDR L1-3 of SEQ ID NO: 705-707;
[0213] u) CDR H1-3 of SEQ ID NO: 722-724 and CDR L1-3 of SEQ ID NO: 717 719;
[0214] v) CDR H1-3 of SEQ ID NO: 734-736 and CDR L1-3 of SEQ ID NO: 729 731;
[0215] w) CDR H1-3 of SEQ ID NO: 746-748 and CDR L1-3 of SEQ ID NO: 741 743;
[0216] x) CDR H1-3 of SEQ ID NO: 758-760 and CDR L1-3 of SEQ ID NO: 753 755;
[0217] y) CDR H1-3 of SEQ ID NO: 1271-1273 and CDR L1-3 of SEQ ID NO: 1276 1278;
[0218] z) CDR H1-3 of SEQ ID NO: 1285-1287 and CDR L1-3 of SEQ ID NO: 1290 1292;
[0219] aa) CDR H1-3 of SEQ ID NO: 1299-1301 and CDR L1-3 of SEQ ID NO: 1304-1306;
[0220] ab) CDR H1-3 of SEQ ID NO: 1313-1315 and CDR L1-3 of SEQ ID NO: 1318-1320;
[0221] ac) CDR H1-3 of SEQ ID NO: 1327-1329 and CDR L1-3 of SEQ ID NO: 1332-1334;
[0222] ad) CDR H1-3 of SEQ ID NO: 1341-1343 and CDR L1-3 of SEQ ID NO: 1346-1348;
[0223] ae) CDR H1-3 of SEQ ID NO: 1355-1357 and CDR L1-3 of SEQ ID NO: 1360-1362;
[0224] af) CDR H1-3 of SEQ ID NO: 1369-1371 and CDR L1-3 of SEQ ID NO: 1374 1376; and
[0225] ag) CDR H1-3 of SEQ ID NO: 1383-1385 and CDR L1-3 of SEQ ID NO: 1388-1390.

[0226] The sequences of the corresponding VL- and VH-regions of the second binding domain of the bispecific single chain antibody molecule of the invention as well as of the respective scFvs are shown in the sequence listing.

[0227] In the bispecific single chain antibody molecule of the invention the binding domains are arranged in the order VL-VH-VH-VL, VL-VH-VL-VH, VH-VL-VH-VL or VH-VL-VL-VH, as exemplified in the appended examples. Preferably, the binding domains are arranged in the order VH CD19-VL CD19-VH CD3-VL CD3 or VL CD19-VH CD19-VH CD3-VL CD3. More preferably, the binding domains are arranged in the order VL CD19-VH CD19-VH CD3-VL CD3.

[0228] A particularly preferred embodiment of the invention concerns an above characterized polypeptide, wherein the bispecific single chain antibody molecule comprises a sequence selected from:
[0229] (a) an amino acid sequence as depicted in any of SEQ ID NOs. 481, 485, 483, 533, 521, 509, 497, 545, 557, 569, 581, 593, 605, 617, 629, 641, 653, 665, 677, 689, 701, 713, 725, 737, 749, 761, 1282, 1296, 1310, 1324, 1338, 1352, 1366, 1380 or 1394;
[0230] (b) an amino acid sequence encoded by a nucleic acid sequence as depicted in any of SEQ ID NOs: 482, 486, 484, 534, 522, 510, 498, 546, 558, 570, 582, 594, 606, 618, 630, 642, 654, 666, 678, 690, 702, 714, 726, 738, 750, 762, 1283, 1297, 1311, 1325, 1339, 1353, 1367, 1381 or 1395; and
[0231] (c) an amino acid sequence at least 90% identical, more preferred at least 95% identical, most preferred at least 96% identical to the amino acid sequence of (a) or (b).

[0232] The invention relates to a bispecific single chain antibody molecule comprising an amino acid sequence as depicted in any of SEQ ID NOs: 481, 485, 483, 533, 521, 509, 497, 545, 557, 569, 581, 593, 605, 617, 629, 641, 653, 665, 677, 689, 701, 713, 725, 737, 749, 761, 1282, 1296, 1310, 1324, 1338, 1352, 1366, 1380 or 1394, as well as to an amino acid sequences at least 85% identical, preferably 90%, more preferred at least 95% identical, most preferred at least 96, 97, 98, or 99% identical to the amino acid sequence of SEQ ID NOs: 481, 485, 483, 533, 521, 509, 497, 545, 557, 569, 581, 593, 605, 617, 629, 641, 653, 665, 677, 689, 701, 713, 725, 737, 749, 761, 1282, 1296, 1310, 1324, 1338, 1352, 1366, 1380 or 1394. The invention relates also to the corresponding nucleic acid sequences as depicted in any of SEQ ID NOs: 482, 486, 484, 534, 522, 510, 498, 546, 558, 570, 582, 594, 606, 618, 630, 642, 654, 666, 678, 690, 702, 714, 726, 738, 750, 762, 1283, 1297, 1311, 1325, 1339, 1353, 1367, 1381 or 1395 as well as to nucleic acid sequences at least 85% identical, preferably 90%, more preferred at least 95% identical, most preferred at least 96, 97, 98, or 99% identical to the nucleic acid sequences shown in SEQ ID NOs: 482, 486, 484, 534, 522, 510, 498, 546, 558, 570, 582, 594, 606, 618, 630, 642, 654, 666, 678, 690, 702, 714, 726, 738, 750, 762, 1283, 1297, 1311, 1325, 1339, 1353, 1367, 1381 or 1395. It is to be understood that the sequence identity is determined over the entire nucleotide or amino acid sequence. For sequence alignments, for example, the programs Gap or BestFit can be used (Needleman and Wunsch J. Mol. Biol. 48 (1970), 443-453; Smith and Waterman, Adv. Appl. Math 2 (1981), 482-489), which is contained in the GCG software package (Genetics Computer Group, 575 Science Drive, Madison, Wisconsin, USA 53711 (1991). It is a routine method for those skilled in the art to determine and identify a nucleotide or amino acid sequence having e.g. 85% (90%, 95%, 96%, 97%, 98% or 99%) sequence identity to the nucleotide or amino acid sequences of the bispecific single single chain antibody of the invention. For example, according to Crick's Wobble hypothesis, the 5′ base on the anti-codon is not as spatially confined as the other two bases, and could thus have non-standard base pairing. Put in other words: the third position in a codon triplet may vary so that two triplets which differ in this third position may encode the same amino acid residue. Said hypothesis is well known to the person skilled in the art (see e.g. http://en.wikipedia.org/wiki/Wobble_Hypothesis; Crick, J Mol Biol 19 (1966): 548-55).

[0233] Preferred domain arrangements in the CD19×CD3 bispecific single chain antibody constructs of the invention are shown in the following examples.

[0234] In a preferred embodiment of the invention, the bispecific single chain antibodies are cross-species specific for CD3 epsilon and for the human and non-chimpanzee primate cell surface antigen CD19 recognized by their second binding domain.

c-MET×CD3

[0235] According to a preferred embodiment of the invention an above characterized bispecific single chain antibody molecule comprises a group of the following sequences as CDR H1, CDR H2, CDR H3, CDR L1, CDR L2 and CDR L3 in the second binding domain selected from the group consisting of:
[0236] a) CDR H1-3 of SEQ ID NO: 821-823 and CDR L1-3 of SEQ ID NO: 816 818;
[0237] b) CDR H1-3 of SEQ ID NO: 836-838 and CDR L1-3 of SEQ ID NO: 833 835;
[0238] c) CDR H1-3 of SEQ ID NO: 845-847 and CDR L1-3 of SEQ ID NO: 840 842;
[0239] d) CDR H1-3 of SEQ ID NO: 863-865 and CDR L1-3 of SEQ ID NO: 858 860;
[0240] e) CDR H1-3 of SEQ ID NO: 881-883 and CDR L1-3 of SEQ ID NO: 876 878;
[0241] f) CDR H1-3 of SEQ ID NO: 899-901 and CDR L1-3 of SEQ ID NO: 894 896;
[0242] g) CDR H1-3 of SEQ ID NO: 1401-1403 and CDR L1-3 of SEQ ID NO: 1406 1408;
[0243] h) CDR H1-3 of SEQ ID NO: 1415-1417 and CDR L1-3 of SEQ ID NO: 1420 1422;
[0244] i) CDR H1-3 of SEQ ID NO: 1429-1431 and CDR L1-3 of SEQ ID NO: 1434 1436;
[0245] j) CDR H1-3 of SEQ ID NO: 1443-1445 and CDR L1-3 of SEQ ID NO: 1448 1450;
[0246] k) CDR H1-3 of SEQ ID NO: 1457-1459 and CDR L1-3 of SEQ ID NO: 1462 1464;
[0247] l) CDR H1-3 of SEQ ID NO: 1471-1473 and CDR L1-3 of SEQ ID NO: 1476 1478;
[0248] m) CDR H1-3 of SEQ ID NO: 1639-1641 and CDR L1-3 of SEQ ID NO: 1644 1646;
[0249] n) CDR H1-3 of SEQ ID NO: 1625-1627 and CDR L1-3 of SEQ ID NO: 1630 1632;
[0250] o) CDR H1-3 of SEQ ID NO: 1611-1613 and CDR L1-3 of SEQ ID NO: 1616 1618;
[0251] p) CDR H1-3 of SEQ ID NO: 1597-1599 and CDR L1-3 of SEQ ID NO: 1602 1604;
[0252] q) CDR H1-3 of SEQ ID NO: 1569-1571 and CDR L1-3 of SEQ ID NO: 1574 1576;
[0253] r) CDR H1-3 of SEQ ID NO: 1555-1557 and CDR L1-3 of SEQ ID NO: 1560 1562;
[0254] s) CDR H1-3 of SEQ ID NO: 1583-1585 and CDR L1-3 of SEQ ID NO: 1588 1590;
[0255] t) CDR H1-3 of SEQ ID NO: 1541-1543 and CDR L1-3 of SEQ ID NO: 1546 1548;
[0256] u) CDR H1-3 of SEQ ID NO: 1513-1515 and CDR L1-3 of SEQ ID NO: 1518 1520;
[0257] v) CDR H1-3 of SEQ ID NO: 1527-1529 and CDR L1-3 of SEQ ID NO: 1532 1534;
[0258] w) CDR H1-3 of SEQ ID NO: 1499-1501 and CDR L1-3 of SEQ ID NO: 1504 1506; and
[0259] x) CDR H1-3 of SEQ ID NO: 1485-1487 and CDR L1-3 of SEQ ID NO: 1490 1492.

[0260] The sequences of the corresponding VL- and VH-regions of the second binding domain of the bispecific single chain antibody molecule of the invention as well as of the respective scFvs are shown in the sequence listing.

[0261] In the bispecific single chain antibody molecule of the invention the binding domains are arranged in the order VL-VH-VH-VL, VL-VH-VL-VH, VH-VL-VH-VL or VH-VL-VL-VH, as exemplified in the appended examples. Preferably, the binding domains are arranged in the order VH C-MET-VL C-MET-VH CD3-VL CD3 or VL C-MET-VH C-MET-VH CD3-VL CD3.

[0262] A particularly preferred embodiment of the invention concerns an above characterized polypeptide, wherein the bispecific single chain antibody molecule comprises a sequence selected from:
[0263] (a) an amino acid sequence as depicted in any of SEQ ID NOs. 829, 853, 871, 889, 831, 855, 873, 891, 905, 1412, 1426, 1440, 1454, 1468 or 1482;
[0264] (b) an amino acid sequence encoded by a nucleic acid sequence as depicted in any of SEQ ID NOs: 830, 854, 872, 890, 832, 856, 874, 892, 906, 1413, 1427, 1441, 1455, 1469, or 1483; and
[0265] (c) an amino acid sequence at least 90% identical, more preferred at least 95% identical, most preferred at least 96% identical to the amino acid sequence of (a) or (b).

[0266] The invention relates to a bispecific single chain antibody molecule comprising an amino acid sequence as depicted in any of SEQ ID NOs: 829, 853, 871, 889, 831, 855, 873, 891, 905, 1412, 1426, 1440, 1454, 1468 or 1482;, as well as to an amino acid sequences at least 85% identical, preferably 90%, more preferred at least 95% identical, most preferred at least 96, 97, 98, or 99% identical to the amino acid sequence of SEQ ID NOs: 829, 853, 871, 889, 831, 855, 873, 891, 905, 1412, 1426, 1440, 1454, 1468 or 1482;. The invention relates also to the corresponding nucleic acid sequences as depicted in any of SEQ ID NOs: 830, 854, 872, 890, 832, 856, 874, 892, 906, 1413, 1427, 1441, 1455, 1469, or 1483; as well as to nucleic acid sequences at least 85% identical, preferably 90%, more preferred at least 95% identical, most preferred at least 96, 97, 98, or 99% identical to the nucleic acid sequences shown in SEQ ID NOs: 830, 854, 872, 890, 832, 856, 874, 892, 906, 1413, 1427, 1441, 1455, 1469, or 1483;. It is to be understood that the sequence identity is determined over the entire nucleotide or amino acid sequence. For sequence alignments, for example, the programs Gap or BestFit can be used (Needleman and Wunsch J. Mol. Biol. 48 (1970), 443-453; Smith and Waterman, Adv. Appl. Math 2 (1981), 482-489), which is contained in the GCG software package (Genetics Computer Group, 575 Science Drive, Madison, Wisconsin, USA 53711 (1991). It is a routine method for those skilled in the art to determine and identify a nucleotide or amino acid sequence having e.g. 85% (90%, 95%, 96%, 97%, 98% or 99%) sequence identity to the nucleotide or amino acid sequences of the bispecific single single chain antibody of the invention. For example, according to Crick's Wobble hypothesis, the 5′ base on the anti-codon is not as spatially confined as the other two bases, and could thus have non-standard base pairing. Put in other words: the third position in a codon triplet may vary so that two triplets which differ in this third position may encode the same amino acid residue. Said hypothesis is well known to the person skilled in the art (see e.g. http://en.wikipedia.org/wiki/Wobble_Hypothesis; Crick, J Mol Biol 19 (1966): 548-55).

[0267] Preferred domain arrangements in the C-MET×CD3 bispecific single chain antibody constructs of the invention are shown in the following examples.

[0268] In a preferred embodiment of the invention, the bispecific single chain antibodies are cross-species specific for CD3 epsilon and for the human and non-chimpanzee primate cell surface antigen C-MET recognized by their second binding domain.

### Endosialin×CD3

[0269] According to a preferred embodiment of the invention an above characterized bispecific single chain antibody molecule comprises a group of the following sequences as CDR H1, CDR H2, CDR H3, CDR L1, CDR L2 and CDR L3 in the second binding domain selected from the group consisting of:
[0270] CDR H1-3 of SEQ ID NO: 910-912 and CDR L1-3 of SEQ ID NO: 907-909.

[0271] Starting from these CDR sequences of the heavy and light chain for the second binding domain the person skilled in the art can produce a bispecific single chain antibody molecule of the invention without any further inventive ado. In particular, the CDR sequences can be positioned in a framework of a VL and a VH chain and arranged in form of a scFv.

[0272] According to a preferred embodiment of the invention an above characterized bispecific single chain antibody molecule comprises a group of the following sequences as CDR H1, CDR H2, CDR H3, CDR L1, CDR L2 and CDR L3 in the second binding domain selected from the group consisting of:
[0273] a) CDR H1-3 of SEQ ID NO: 1653-1655 and CDR L1-3 of SEQ ID NO: 1658 1660;
[0274] b) CDR H1-3 of SEQ ID NO: 1667-1669 and CDR L1-3 of SEQ ID NO: 1672 1674;
[0275] c) CDR H1-3 of SEQ ID NO: 1681-1683 and CDR L1-3 of SEQ ID NO: 1686 1688; and
[0276] d) CDR H1-3 of SEQ ID NO: 1695-1697 and CDR L1-3 of SEQ ID NO: 1700 1702;
[0277] e) CDR H1-3 of SEQ ID NO: 1709-1711 and CDR L1-3 of SEQ ID NO: 1714 1716; and
[0278] f) CDR H1-3 of SEQ ID NO: 1723-1725 and CDR L1-3 of SEQ ID NO: 1728-1730.

[0279] In the bispecific single chain antibody molecule of the invention the binding domains are arranged in the order VL-VH-VH-VL, VL-VH-VL-VH, VH-VL-VH-VL or VH-VL-VL-VH, as exemplified in the appended examples. Preferably, the binding domains are arranged in the order VH Endosialin-VL Endosialin-VH CD3-VL CD3 or VL Endosialin-VH Endosialin-VH CD3-VL CD3.

[0280] A particularly preferred embodiment of the invention concerns an above characterized polypeptide, wherein the bispecific single chain antibody molecule comprises an above characterized first binding domain capable of binding to an epitope of human and non-chimpanzee primate CD3ε and a second binding domain capable of binding to Endosialin and comprising the CDR H1, 2 and 3 of SEQ ID NOs: 910-912 and the CDR L1, 2 and 3 of SEQ ID NOs: 907-909, or CDR amino acid sequences at least 50%, 60%, 70%, 75%, 80%, 85%, or 90% identical, more preferred at least 95% identical, most preferred at least 96%, 97%, 98%, or 99% identical to each of the respective amino acid sequences of the above defined CDRs. It is to be understood that the sequence identity is determined over the entire CDRH or CDRL amino acid sequence.

[0281] A particularly preferred embodiment of the invention concerns an above characterized polypeptide, wherein the bispecific single chain antibody molecule comprises a sequence selected from:
[0282] (a) an amino acid sequence as depicted in any of SEQ ID NOs. 1664, 1678, 1692, 1706, 1720, or 1734;
[0283] (b) an amino acid sequence encoded by a nucleic acid sequence as depicted in any of SEQ ID NOs: 1665, 1679, 1693, 1707, 1721, or 1735; and
[0284] (c) an amino acid sequence at least 90% identical, more preferred at least 95% identical, most preferred at least 96% identical to the amino acid sequence of (a) or (b).

[0285] The invention relates to a bispecific single chain antibody molecule comprising an amino acid sequence as depicted in any of SEQ ID NOs: 1664, 1678, 1692, 1706, 1720, or 1734, as well as to an amino acid sequences at least 85% identical, preferably 90%, more preferred at least 95% identical, most preferred at least 96, 97, 98, or 99% identical to the amino acid sequence of SEQ ID NOs: 1664, 1678, 1692, 1706, 1720, or 1734. The invention relates also to the corresponding nucleic acid sequences as depicted in any of SEQ ID NOs: 1665, 1679, 1693, 1707, 1721, or 1735; as well as to nucleic acid sequences at least 85% identical, preferably 90%, more preferred at least 95% identical, most preferred at least 96, 97, 98, or 99% identical to the nucleic acid sequences shown in SEQ ID NOs: 1665, 1679, 1693, 1707, 1721, or 1735.

[0286] If not indicated otherwise, it is to be understood that the sequence identity is determined over the entire nucleotide or amino acid sequence. For sequence alignments, for example, the programs Gap or BestFit can be used (Needleman and Wunsch J. Mol. Biol. 48 (1970), 443-453; Smith and Waterman, Adv. Appl. Math 2 (1981), 482-489), which is contained in the GCG software package (Genetics Computer Group, 575 Science Drive, Madison, Wisconsin, USA 53711 (1991). It is a routine method for those skilled in the art to determine and identify a nucleotide or amino acid sequence or CDR sequence having e.g. 50% (60%, 70%, 75%, 80%, 85%, 90%, 95%, 96%, 97%, 98% or 99%) sequence identity to the nucleotide or amino acid or CDR sequences of the bispecific single single chain antibody of the invention. For example, according to Crick's Wobble hypothesis, the 5′ base on the anti-codon is not as spatially confined as the other two bases, and could thus have non-standard base pairing. Put in other words: the third position in a codon triplet may vary so that two triplets which differ in this third position may encode the same amino acid residue. Said hypothesis is well known to the person skilled in the art (see e.g. http://en.wikipedia.org/wiki/Wobble_Hypothesis; Crick, J Mol Biol 19 (1966): 548-55).

[0287] Preferred domain arrangements in the Endosialin×CD3 bispecific single chain antibody constructs of the invention are shown in the following examples.

[0288] In a preferred embodiment of the invention, the bispecific single chain antibodies are cross-species specific for CD3 epsilon and for the human and non-chimpanzee primate cell surface antigen Endosialin recognized by their second binding domain.

### EpCAM×CD3

[0289] According to a preferred embodiment of the invention an above characterized bispecific single chain antibody molecule comprises a group of the following sequences as CDR H1, CDR H2, CDR H3, CDR L1, CDR L2 and CDR L3 in the second binding domain selected from the group consisting of:
[0290] a) CDR H1-3 of SEQ ID NO: 940-942 and CDR L1-3 of SEQ ID NO: 935 937;
[0291] b) CDR H1-3 of SEQ ID NO: 956-958 and CDR L1-3 of SEQ ID NO: 951 953;
[0292] c) CDR H1-3 of SEQ ID NO: 968-970 and CDR L1-3 of SEQ ID NO: 963 965; and
[0293] d) CDR H1-3 of SEQ ID NO: 980-982 and CDR L1-3 of SEQ ID NO: 975-977;
[0294] e) CDR H1-3 of SEQ ID NO: 992-994 and CDR L1-3 of SEQ ID NO: 987 989;
[0295] f) CDR H1-3 of SEQ ID NO: 1004-1006 and CDR L1-3 of SEQ ID NO: 999 1001;
[0296] g) CDR H1-3 of SEQ ID NO: 1028-1030 and CDR L1-3 of SEQ ID NO: 1023 1025;
[0297] h) CDR H1-3 of SEQ ID NO: 1040-1042 and CDR L1-3 of SEQ ID NO: 1035 1037;
[0298] i) CDR H1-3 of SEQ ID NO: 1052-1054 and CDR L1-3 of SEQ ID NO: 1047 1049;
[0299] j) CDR H1-3 of SEQ ID NO: 1074-1076 and CDR L1-3 of SEQ ID NO: 1069 1071;
[0300] k) CDR H1-3 of SEQ ID NO: 1086-1088 and CDR L1-3 of SEQ ID NO: 1081 1083;
[0301] l) CDR H1-3 of SEQ ID NO: 1098-1000 and CDR L1-3 of SEQ ID NO: 1093 1095;
[0302] m) CDR H1-3 of SEQ ID NO: 1110-1112 and CDR L1-3 of SEQ ID NO: 1105 1107;
[0303] n) CDR H1-3 of SEQ ID NO: 1122-1124 and CDR L1-3 of SEQ ID NO: 1117 1119;
[0304] o) CDR H1-3 of SEQ ID NO: 1016-1018 and CDR L1-3 of SEQ ID NO: 1011 1013; and
[0305] p) CDR H1-3 of SEQ ID NO: 1765-1767 and CDR L1-3 of SEQ ID NO: 1770-1772.

[0306] The sequences of the corresponding VL- and VH-regions of the second binding domain of the bispecific single chain antibody molecule of the invention as well as of the respective scFvs are shown in the sequence listing.

[0307] In the bispecific single chain antibody molecule of the invention the binding domains are arranged in the order VL-VH-VH-VL, VL-VH-VL-VH, VH-VL-VH-VL or VH-VL-VL-VH, as exemplified in the appended examples. Preferably, the binding domains are arranged in the order VH EpCAM-VL EpCAM-VH CD3-VL CD3 or VL EpCAM-VH EpCAM-VH CD3-VL CD3. More preferably, the binding domains are arranged in the order VL EpCAM-VH EpCAM-VH CD3-VL CD3.

[0308] A particularly preferred embodiment of the invention concerns an above characterized polypeptide, wherein the bispecific single chain antibody molecule comprises a sequence selected from:
[0309] (a) an amino acid sequence as depicted in any of SEQ ID NOs. 944, 948, 946, 960, 972, 984, 996, 1008, 1032, 1044, 1056, 1078, 1090, 1102, 1114, 1126, 1020, or 1776;
[0310] (b) an amino acid sequence encoded by a nucleic acid sequence as depicted in any of SEQ ID NOs: 945, 949, 947, 961, 973, 985, 979, 1009, 1033, 1045, 1057, 1079, 1091, 1103, 1115, 1127, 1021, or 1777;
[0311] and
[0312] (c) an amino acid sequence at least 90% identical, more preferred at least 95% identical, most preferred at least 96% identical to the amino acid sequence of (a) or (b).

[0313] The invention relates to a bispecific single chain antibody molecule comprising an amino acid sequence as depicted in any of SEQ ID NOs: 944, 948, 946, 960, 972, 984, 996, 1008, 1032, 1044, 1056, 1078, 1090, 1102, 1114, 1126, 1020, or 1776, as well as to an amino acid sequences at least 85% identical, preferably 90%, more preferred at least 95% identical, most preferred at least 96, 97, 98, or 99% identical to the amino acid sequence of SEQ ID NOs: 944, 948, 946, 960, 972, 984, 996, 1008, 1032, 1044, 1056, 1078, 1090, 1102, 1114, 1126, 1020, or 1776. The invention relates also to the corresponding nucleic acid sequences as depicted in any of SEQ ID NOs: 945, 949, 947, 961, 973, 985, 979, 1009, 1033, 1045, 1057, 1079, 1091, 1103, 1115, 1127, 1021, or 1777 as well as to nucleic acid sequences at least 85% identical, preferably 90%, more preferred at least 95% identical, most preferred at least 96, 97, 98, or 99% identical to the nucleic acid sequences shown in SEQ ID NOs: 945, 949, 947, 961, 973, 985, 979, 1009, 1033, 1045, 1057, 1079, 1091, 1103, 1115, 1127, 1021, or 1777. It is to be understood that the sequence identity is determined over the entire nucleotide or amino acid sequence. For sequence alignments, for example, the programs Gap or BestFit can be used (Needleman and Wunsch J. Mol. Biol. 48 (1970), 443-453; Smith and Waterman, Adv. Appl. Math 2 (1981), 482-489), which is contained in the GCG software package (Genetics Computer Group, 575 Science Drive, Madison, Wisconsin, USA 53711 (1991). It is a routine method for those skilled in the art to determine and identify a nucleotide or amino acid sequence having e.g. 85% (90%, 95%, 96%, 97%, 98% or 99%) sequence identity to the nucleotide or amino acid sequences of the bispecific single single chain antibody of the invention. For example, according to Crick's Wobble hypothesis, the 5′ base on the anti-codon is not as spatially confined as the other two bases, and could thus have non-standard base pairing. Put in other words: the third position in a codon triplet may vary so that two triplets which differ in this third position may encode the same amino acid residue. Said hypothesis is well known to the person skilled in the art (see e.g. http://en.wikipedia.org/wiki/Wobble_Hypothesis; Crick, J Mol Biol 19 (1966): 548-55).

[0314] Preferred domain arrangements in the EpCAM×CD3 bispecific single chain antibody constructs of the invention are shown in the following examples.

[0315] In a preferred embodiment of the invention, the bispecific single chain antibodies are cross-species specific for CD3 epsilon and for the human and non-chimpanzee primate cell surface antigen EpCAM recognized by their second binding domain.

### FAPα×CD3

[0316] According to a preferred embodiment of the invention an above characterized bispecific single chain antibody molecule comprises a group of the following sequences as CDR H1, CDR H2, CDR H3, CDR L1, CDR L2 and CDR L3 in the second binding domain selected from:
[0317] CDR H1-3 of SEQ ID NO: 1137-1139 and CDR L1-3 of SEQ ID NO: 1132 1134.

[0318] The sequences of the corresponding VL- and VH-regions of the second binding domain of the bispecific single chain antibody molecule of the invention as well as of the respective scFvs are shown in the sequence listing.

[0319] According to a preferred embodiment of the invention an above characterized bispecific single chain antibody molecule comprises a group of the following sequences as CDR H1, CDR H2, CDR H3, CDR L1, CDR L2 and CDR L3 in the second binding domain selected from the group consisting of:
[0320] a) CDR H1-3 of SEQ ID NO: 1137-1139 and CDR L1-3 of SEQ ID NO: 1132 1134;
[0321] b) CDR H1-3 of SEQ ID NO: 1849-1851 and CDR L1-3 of SEQ ID NO: 1854 1856;
[0322] c) CDR H1-3 of SEQ ID NO: 1835-1837 and CDR L1-3 of SEQ ID NO: 1840 1842; and
[0323] d) CDR H1-3 of SEQ ID NO: 1779-1781 and CDR L1-3 of SEQ ID NO: 1784 1786;
[0324] e) CDR H1-3 of SEQ ID NO: 1793-1795 and CDR L1-3 of SEQ ID NO: 1798 1800;
[0325] f) CDR H1-3 of SEQ ID NO: 1863-1865 and CDR L1-3 of SEQ ID NO: 1868 1870;
[0326] g) CDR H1-3 of SEQ ID NO: 1807-1809 and CDR L1-3 of SEQ ID NO: 1812 1814;
[0327] h) CDR H1-3 of SEQ ID NO: 1821-1823 and CDR L1-3 of SEQ ID NO: 1826 1828;
[0328] i) CDR H1-3 of SEQ ID NO: 1891-1893 and CDR L1-3 of SEQ ID NO: 1896 1898;
[0329] j) CDR H1-3 of SEQ ID NO: 1877-1879 and CDR L1-3 of SEQ ID NO: 1882 1884;
[0330] k) CDR H1-3 of SEQ ID NO: 1961-1963 and CDR L1-3 of SEQ ID NO: 1966 1968;
[0331] l) CDR H1-3 of SEQ ID NO: 1947-1949 and CDR L1-3 of SEQ ID NO: 1952-1954;
[0332] m) CDR H1-3 of SEQ ID NO: 1975-1977 and CDR L1-3 of SEQ ID NO: 1980 1982;
[0333] n) CDR H1-3 of SEQ ID NO: 1933-1935 and CDR L1-3 of SEQ ID NO: 1938 1940;
[0334] o) CDR H1-3 of SEQ ID NO: 1919-1921 and CDR L1-3 of SEQ ID NO: 1924 1926; and
[0335] p) CDR H1-3 of SEQ ID NO: 1905-1907 and CDR L1-3 of SEQ ID NO: 1910-1912.

[0336] In the bispecific single chain antibody molecule of the invention the binding domains are arranged in the order VL-VH-VH-VL, VL-VH-VL-VH, VH-VL-VH-VL or VH-VL-VL-VH, as exemplified in the appended examples. Preferably, the binding domains are arranged in the order VH FAP alpha-VL FAP alpha-VH CD3-VL CD3 or VL FAP alpha-VH FAP alpha-VH CD3-VL CD3. More preferred, the binding domains are arranged in the order VL FAP alpha-VH FAP alpha-VH CD3-VL CD3.

[0337] A particularly preferred embodiment of the invention concerns an above characterized polypeptide, wherein the bispecific single chain antibody molecule comprises a sequence selected from:
[0338] (a) an amino acid sequence as depicted in any of SEQ ID NOs. 1143, 1147, 1145, 1860, 1846, 1790, 1804, 1874, 1818, or 1832;
[0339] (b) an amino acid sequence encoded by a nucleic acid sequence as depicted in any of SEQ ID NOs: 1144, 1148, 1146, 1861, 1847, 1791, 1805, 1875, 1818 or 1833; and
[0340] (c) an amino acid sequence at least 90% identical, more preferred at least 95% identical, most preferred at least 96% identical to the amino acid sequence of (a) or (b).

[0341] The invention relates to a bispecific single chain antibody molecule comprising an amino acid sequence as depicted in any of SEQ ID NOs: 1143, 1147, 1145, 1860, 1846, 1790, 1804, 1874, 1818, or 1832, as well as to an amino acid sequences at least 85% identical, preferably 90%, more preferred at least 95% identical, most preferred at least 96, 97, 98, or 99% identical to the amino acid sequence of SEQ ID NOs: 1143, 1147, 1145, 1860, 1846, 1790, 1804, 1874, 1818, or 1832. The invention relates also to the corresponding nucleic acid sequences as depicted in any of SEQ ID NOs: 1144, 1148, 1146, 1861, 1847, 1791, 1805, 1875, 1818 or 1833, as well as to nucleic acid sequences at least 85% identical, preferably 90%, more preferred at least 95% identical, most preferred at least 96, 97, 98, or 99% identical to the nucleic acid sequences shown in SEQ ID NOs: 1144, 1148, 1146, 1861, 1847, 1791, 1805, 1875, 1818 or 1833. It is to be understood that the sequence identity is determined over the entire nucleotide or amino acid sequence. For sequence alignments, for example, the programs Gap or BestFit can be used (Needleman and Wunsch J. Mol. Biol. 48 (1970), 443-453; Smith and Waterman, Adv. Appl. Math 2 (1981), 482-489), which is contained in the GCG software package (Genetics Computer Group, 575 Science Drive, Madison, Wisconsin, USA 53711 (1991). It is a routine method for those skilled in the art to determine and identify a nucleotide or amino acid sequence having e.g. 85% (90%, 95%, 96%, 97%, 98% or 99%) sequence identity to the nucleotide or amino acid sequences of the bispecific single single chain antibody of the invention. For example, according to Crick's Wobble hypothesis, the 5′ base on the anti-codon is not as spatially confined as the other two bases, and could thus have non-standard base pairing. Put in other words: the third position in a codon triplet may vary so that two triplets which differ in this third position may encode the same amino acid residue. Said hypothesis is well known to the person skilled in the art (see e.g. http://en.wikipedia.org/wiki/Wobble_Hypothesis; Crick, J Mol Biol 19 (1966): 548-55).

[0342] Preferred domain arrangements in the FAPalpha×CD3 bispecific single chain antibody constructs of the invention are shown in the following examples.

[0343] In a preferred embodiment of the invention, the bispecific single chain antibodies are cross-species specific for CD3 epsilon and for the human and non-chimpanzee primate cell surface antigen FAP alpha recognized by their second binding domain.

### IGF-1R×CD3

[0344] According to a preferred embodiment of the invention an above characterized bispecific single chain antibody molecule comprises a group of the following sequences as CDR H1, CDR H2, CDR H3, CDR L1, CDR L2 and CDR L3 in the second binding domain selected from the group consisting of:
[0345] a) CDR H1-3 of SEQ ID NO: 2016-2018 and CDR L1-3 of SEQ ID NO: 2021 2023;
[0346] b) CDR H1-3 of SEQ ID NO: 2030-2032 and CDR L1-3 of SEQ ID NO: 2035 2037;
[0347] c) CDR H1-3 of SEQ ID NO: 2044-2046 and CDR L1-3 of SEQ ID NO: 2049 2051; and
[0348] d) CDR H1-3 of SEQ ID NO: 2058-2060 and CDR L1-3 of SEQ ID NO: 2063 2065;
[0349] e) CDR H1-3 of SEQ ID NO: 2072-2074 and CDR L1-3 of SEQ ID NO: 2077 2079;
[0350] f) CDR H1-3 of SEQ ID NO: 2086-2088 and CDR L1-3 of SEQ ID NO: 2091 2093;
[0351] g) CDR H1-3 of SEQ ID NO: 2100-2102 and CDR L1-3 of SEQ ID NO: 2105 2107;
[0352] h) CDR H1-3 of SEQ ID NO: 2114-2116 and CDR L1-3 of SEQ ID NO: 2119 2121;
[0353] i) CDR H1-3 of SEQ ID NO: 2128-2130 and CDR L1-3 of SEQ ID NO: 2133 2135;
[0354] j) CDR H1-3 of SEQ ID NO: 2142-2144 and CDR L1-3 of SEQ ID NO: 2147 2149;
[0355] k) CDR H1-3 of SEQ ID NO: 2156-2158 and CDR L1-3 of SEQ ID NO: 2161 2163;
[0356] l) CDR H1-3 of SEQ ID NO: 2170-2172 and CDR L1-3 of SEQ ID NO: 2175 2177;
[0357] m) CDR H1-3 of SEQ ID NO: 2184-2186 and CDR L1-3 of SEQ ID NO: 2189 2191;
[0358] n) CDR H1-3 of SEQ ID NO: 2198-2200 and CDR L1-3 of SEQ ID NO: 2203 2205; and
[0359] o) CDR H1-3 of SEQ ID NO: 2212-2214 and CDR L1-3 of SEQ ID NO: 2217-2219.

[0360] The sequences of the corresponding VL- and VH-regions of the second binding domain of the bispecific single chain antibody molecule of the invention as well as of the respective scFvs are shown in the sequence listing.

[0361] In the bispecific single chain antibody molecule of the invention the binding domains are arranged in the order VL-VH-VH-VL, VL-VH-VL-VH, VH-VL-VH-VL or VH-VL-VL-VH, as exemplified in the appended examples. Preferably, the binding domains are arranged in the order VH IGF-1R-VL IGF-1R-VH CD3-VL CD3 or VL IGF-1R-VH IGF1R-VH CD3-VL CD3.

[0362] A particularly preferred embodiment of the invention concerns an above characterized polypeptide, wherein the bispecific single chain antibody molecule comprises a sequence selected from:
[0363] (a) an amino acid sequence as depicted in any of SEQ ID NOs: 2027, 2041, 2055, 2069, 2083, 2097, 2111, 2125, 2139, 2153, 2167, 2181, 2195, 2209, or 2223;
[0364] (b) an amino acid sequence encoded by a nucleic acid sequence as depicted in any of SEQ ID NOs: 2028, 2042, 2056, 2070, 2084, 2098, 2112, 2126, 2140, 2154, 2168, 2182, 2196, 2210, or 2224; and
[0365] (c) an amino acid sequence at least 90% identical, more preferred at least 95% identical, most preferred at least 96% identical to the amino acid sequence of (a) or (b).

[0366] The invention relates to a bispecific single chain antibody molecule comprising an amino acid sequence as depicted in any of SEQ ID NOs: 2027, 2041, 2055, 2069, 2083, 2097, 2111, 2125, 2139, 2153, 2167, 2181, 2195, 2209, or 2223, as well as to an amino acid sequences at least 85% identical, preferably 90%, more preferred at least 95% identical, most preferred at least 96, 97, 98, or 99% identical to the amino acid sequence of SEQ ID NOs: 2027, 2041, 2055, 2069, 2083, 2097, 2111, 2125, 2139, 2153, 2167, 2181, 2195, 2209, or 2223. The invention relates also to the corresponding nucleic acid sequences as depicted in any of SEQ ID NOs: 2028, 2042, 2056, 2070, 2084, 2098, 2112, 2126, 2140, 2154, 2168, 2182, 2196, 2210, or 2224 as well as to nucleic acid sequences at least 85% identical, preferably 90%, more preferred at least 95% identical, most preferred at least 96, 97, 98, or 99% identical to the nucleic acid sequences shown in SEQ ID NOs: 2028, 2042, 2056, 2070, 2084, 2098, 2112, 2126, 2140, 2154, 2168, 2182, 2196, 2210, or 2224. It is to be understood that the sequence identity is determined over the entire nucleotide or amino acid sequence. For sequence alignments, for example, the programs Gap or BestFit can be used (Needleman and Wunsch J. Mol. Biol. 48 (1970), 443-453; Smith and Waterman, Adv. Appl. Math 2 (1981), 482-489), which is contained in the GCG software package (Genetics Computer Group, 575 Science Drive, Madison, Wisconsin, USA 53711 (1991). It is a routine method for those skilled in the art to determine and identify a nucleotide or amino acid sequence having e.g. 85% (90%, 95%, 96%, 97%, 98% or 99%) sequence identity to the nucleotide or amino acid sequences of the bispecific single single chain antibody of the invention. For example, according to Crick's Wobble hypothesis, the 5′ base on the anti-codon is not as spatially confined as the other two bases, and could thus have non-standard base pairing. Put in other words: the third position in a codon triplet may vary so that two triplets which differ in this third position may encode the same amino acid residue. Said hypothesis is well known to the person skilled in the art (see e.g. http://en.wikipedia.org/wiki/Wobble_Hypothesis; Crick, J Mol Biol 19 (1966): 548-55).

[0367] Preferred domain arrangements in the IGF-1R×CD3 bispecific single chain antibody constructs of the invention are shown in the following examples.

[0368] In a preferred embodiment of the invention, the bispecific single chain antibodies are cross-species specific for CD3 epsilon and for the human and non-chimpanzee primate cell surface antigen IGF-1R recognized by their second binding domain.

[0369] In an alternative embodiment the present invention provides a nucleic acid sequence encoding an above described bispecific single chain antibody molecule of the invention.

[0370] The present invention also relates to a vector comprising the nucleic acid molecule of the present invention.

[0371] Many suitable vectors are known to those skilled in molecular biology, the choice of which would depend on the function desired and include plasmids, cosmids, viruses, bacteriophages and other vectors used conventionally in genetic engineering. Methods which are well known to those skilled in the art can be used to construct various plasmids and vectors; see, for example, the techniques described in Sambrook et al. (loc cit.) and Ausubel, Current Protocols in Molecular Biology, Green Publishing Associates and Wiley Interscience, N.Y. (1989), (1994). Alternatively, the polynucleotides and vectors of the invention can be reconstituted into liposomes for delivery to target cells. As discussed in further details below, a cloning vector was used to isolate individual sequences of DNA. Relevant sequences can be transferred into expression vectors where expression of a particular polypeptide is required. Typical cloning vectors include pBluescript SK, pGEM, pUC9, pBR322 and pGBT9. Typical expression vectors include pTRE, pCAL-n-EK, pESP-1, pOP13CAT.

[0372] Preferably said vector comprises a nucleic acid sequence which is a regulatory sequence operably linked to said nucleic acid sequence defined herein.

[0373] The term “regulatory sequence” refers to DNA sequences, which are necessary to effect the expression of coding sequences to which they are ligated. The nature of such control sequences differs depending upon the host organism. In prokaryotes, control sequences generally include promoter, ribosomal binding site, and terminators. In eukaryotes generally control sequences include promoters, terminators and, in some instances, enhancers, transactivators or transcription factors. The term “control sequence” is intended to include, at a minimum, all components the presence of which are necessary for expression, and may also include additional advantageous components.

[0374] The term “operably linked” refers to a juxtaposition wherein the components so described are in a relationship permitting them to function in their intended manner. A control sequence “operably linked” to a coding sequence is ligated in such a way that expression of the coding sequence is achieved under conditions compatible with the control sequences. In case the control sequence is a promoter, it is obvious for a skilled person that double-stranded nucleic acid is preferably used.

[0375] Thus, the recited vector is preferably an expression vector. An “expression vector” is a construct that can be used to transform a selected host and provides for expression of a coding sequence in the selected host. Expression vectors can for instance be cloning vectors, binary vectors or integrating vectors. Expression comprises transcription of the nucleic acid molecule preferably into a translatable mRNA. Regulatory elements ensuring expression in prokaryotes and/or eukaryotic cells are well known to those skilled in the art. In the case of eukaryotic cells they comprise normally promoters ensuring initiation of transcription and optionally poly-A signals ensuring termination of transcription and stabilization of the transcript. Possible regulatory elements permitting expression in prokaryotic host cells comprise, e.g., the P_{L}, lac, trp or tac promoter in E. coli, and examples of regulatory elements permitting expression in eukaryotic host cells are the AOX1 or GAL1 promoter in yeast or the CMV-, SV40-, RSV-promoter (Rous sarcoma virus), CMV-enhancer, SV40-enhancer or a globin intron in mammalian and other animal cells.

[0376] Beside elements, which are responsible for the initiation of transcription such regulatory elements may also comprise transcription termination signals, such as the SV40-poly-A site or the tk-poly-A site, downstream of the polynucleotide. Furthermore, depending on the expression system used leader sequences capable of directing the polypeptide to a cellular compartment or secreting it into the medium may be added to the coding sequence of the recited nucleic acid sequence and are well known in the art; see also the appended Examples. The leader sequence(s) is (are) assembled in appropriate phase with translation, initiation and termination sequences, and preferably, a leader sequence capable of directing secretion of translated protein, or a portion thereof, into the periplasmic space or extracellular medium. Optionally, the heterologous sequence can encode a fusion protein including an N-terminal identification peptide imparting desired characteristics, e.g., stabilization or simplified purification of expressed recombinant product; see supra. In this context, suitable expression vectors are known in the art such as Okayama-Berg cDNA expression vector pcDV1 (Pharmacia), pCDM8, pRc/CMV, pcDNA1, pcDNA3 (In-vitrogene), pEF-DHFR, pEF-ADA or pEF-neo (Mack et al. PNAS (1995) 92, 7021-7025 and Raum et al. Cancer Immunol Immunother (2001) 50(3), 141-150) or pSPORT1 (GIBCO BRL).

[0377] Preferably, the expression control sequences will be eukaryotic promoter systems in vectors capable of transforming of transfecting eukaryotic host cells, but control sequences for prokaryotic hosts may also be used. Once the vector has been incorporated into the appropriate host, the host is maintained under conditions suitable for high level expression of the nucleotide sequences, and as desired, the collection and purification of the bispecific single chain antibody molecule of the invention may follow; see, e.g., the appended examples.

[0378] An alternative expression system, which can be used to express a cell cycle interacting protein is an insect system. In one such system, Autographa californica nuclear polyhedrosis virus (AcNPV) is used as a vector to express foreign genes in Spodoptera frugiperda cells or in Trichoplusia larvae. The coding sequence of a recited nucleic acid molecule may be cloned into a nonessential region of the virus, such as the polyhedrin gene, and placed under control of the polyhedrin promoter.

[0379] Successful insertion of said coding sequence will render the polyhedrin gene inactive and produce recombinant virus lacking coat protein coat. The recombinant viruses are then used to infect S. frugiperda cells or Trichoplusia larvae in which the protein of the invention is expressed (Smith, J. Virol. 46 (1983), 584; Engelhard, Proc. Nat. Acad. Sci. USA 91 (1994), 3224-3227).

[0380] Additional regulatory elements may include transcriptional as well as translational enhancers. Advantageously, the above-described vectors of the invention comprise a selectable and/or scorable marker.

[0381] Selectable marker genes useful for the selection of transformed cells and, e.g., plant tissue and plants are well known to those skilled in the art and comprise, for example, antimetabolite resistance as the basis of selection for dhfr, which confers resistance to methotrexate (Reiss, Plant Physiol. (Life Sci. Adv.) 13 (1994), 143-149); npt, which confers resistance to the aminoglycosides neomycin, kanamycin and paromycin (Herrera-Estrella, EMBO J. 2 (1983), 987-995) and hygro, which confers resistance to hygromycin (Marsh, Gene 32 (1984), 481-485). Additional selectable genes have been described, namely trpB, which allows cells to utilize indole in place of tryptophan; hisD, which allows cells to utilize histinol in place of histidine (Hartman, Proc. Natl. Acad. Sci. USA 85 (1988), 8047); mannose-6-phosphate isomerase which allows cells to utilize mannose (WO 94/20627) and ODC (ornithine decarboxylase) which confers resistance to the ornithine decarboxylase inhibitor, 2-(difluoromethyl)DL-ornithine, DFMO (McConlogue, 1987, In: Current Communications in Molecular Biology, Cold Spring Harbor Laboratory ed.) or deaminase from Aspergillus terreus which confers resistance to Blasticidin S (Tamura, Biosci. Biotechnol. Biochem. 59 (1995), 2336-2338).

[0382] Useful scorable markers are also known to those skilled in the art and are commercially available. Advantageously, said marker is a gene encoding luciferase (Giacomin, PI. Sci. 116 (1996), 59-72; Scikantha, J. Bact. 178 (1996), 121), green fluorescent protein (Gerdes, FEBS Lett. 389 (1996), 44-47) or ß-glucuronidase (Jefferson, EMBO J. 6 (1987), 3901-3907). This embodiment is particularly useful for simple and rapid screening of cells, tissues and organisms containing a recited vector.

[0383] As described above, the recited nucleic acid molecule can be used alone or as part of a vector to express the bispecific single chain antibody molecule of the invention in cells, for, e.g., purification but also for gene therapy purposes. The nucleic acid molecules or vectors containing the DNA sequence(s) encoding any one of the above described bispecific single chain antibody molecule of the invention is introduced into the cells which in turn produce the polypeptide of interest. Gene therapy, which is based on introducing therapeutic genes into cells by ex-vivo or in-vivo techniques is one of the most important applications of gene transfer. Suitable vectors, methods or gene-delivery systems for in-vitro or in-vivo gene therapy are described in the literature and are known to the person skilled in the art; see, e.g., Giordano, Nature Medicine 2 (1996), 534-539; Schaper, Circ. Res. 79 (1996), 911-919; Anderson, Science 256 (1992), 808-813; Verma, Nature 389 (1994), 239; Isner, Lancet 348 (1996), 370-374; Muhlhauser, Circ. Res. 77 (1995), 1077-1086; Onodera, Blood 91 (1998), 30-36; Verma, Gene Ther. 5 (1998), 692-699; Nabel, Ann. N.Y. Acad. Sci. 811 (1997), 289-292; Verzeletti, Hum. Gene Ther. 9 (1998), 2243-51; Wang, Nature Medicine 2 (1996), 714-716; WO 94/29469; WO 97/00957, U.S. Pat. Nos. 5,580,859; 5,589,466; or Schaper, Current Opinion in Biotechnology 7 (1996), 635-640; dos Santos Coura and Nardi Virol J. (2007), 4:99. The recited nucleic acid molecules and vectors may be designed for direct introduction or for introduction via liposomes, or viral vectors (e.g., adenoviral, retroviral) into the cell. Preferably, said cell is a germ line cell, embryonic cell, or egg cell or derived there from, most preferably said cell is a stem cell. An example for an embryonic stem cell can be, inter alia, a stem cell as described in Nagy, Proc. Natl. Acad. Sci. USA 90 (1993), 8424-8428.

[0384] The invention also provides for a host transformed or transfected with a vector of the invention. Said host may be produced by introducing the above described vector of the invention or the above described nucleic acid molecule of the invention into the host. The presence of at least one vector or at least one nucleic acid molecule in the host may mediate the expression of a gene encoding the above described single chain antibody constructs.

[0385] The described nucleic acid molecule or vector of the invention, which is introduced in the host may either integrate into the genome of the host or it may be maintained extrachromosomally.

[0386] The host can be any prokaryote or eukaryotic cell.

[0387] The term “prokaryote” is meant to include all bacteria, which can be transformed or transfected with DNA or RNA molecules for the expression of a protein of the invention. Prokaryotic hosts may include gram negative as well as gram positive bacteria such as, for example, E. coli, S. typhimurium, Serratia marcescens and Bacillus subtilis. The term “eukaryotic” is meant to include yeast, higher plant, insect and preferably mammalian cells. Depending upon the host employed in a recombinant production procedure, the protein encoded by the polynucleotide of the present invention may be glycosylated or may be non-glycosylated. Especially preferred is the use of a plasmid or a virus containing the coding sequence of the bispecific single chain antibody molecule of the invention and genetically fused thereto an N-terminal FLAG-tag and/or C-terminal His-tag. Preferably, the length of said FLAG-tag is about 4 to 8 amino acids, most preferably 8 amino acids. An above described polynucleotide can be used to transform or transfect the host using any of the techniques commonly known to those of ordinary skill in the art. Furthermore, methods for preparing fused, operably linked genes and expressing them in, e.g., mammalian cells and bacteria are well-known in the art (Sambrook, loc cit.).

[0388] Preferably, said the host is a bacterium or an insect, fungal, plant or animal cell.

[0389] It is particularly envisaged that the recited host may be a mammalian cell. Particularly preferred host cells comprise CHO cells, COS cells, myeloma cell lines like SP2/0 or NS/0. As illustrated in the appended examples, particularly preferred are CHO-cells as hosts.

[0390] More preferably said host cell is a human cell or human cell line, e.g. per.c6 (Kroos, Biotechnol. Prog., 2003, 19:163-168).

[0391] In a further embodiment, the present invention thus relates to a process for the production of a bispecific single chain antibody molecule of the invention, said process comprising culturing a host of the invention under conditions allowing the expression of the bispecific single chain antibody molecule of the invention and recovering the produced polypeptide from the culture.

[0392] The transformed hosts can be grown in fermentors and cultured according to techniques known in the art to achieve optimal cell growth. The bispecific single chain antibody molecule of the invention can then be isolated from the growth medium, cellular lysates, or cellular membrane fractions. The isolation and purification of the, e.g., microbially expressed bispecific single chain antibody molecules may be by any conventional means such as, for example, preparative chromatographic separations and immunological separations such as those involving the use of monoclonal or polyclonal antibodies directed, e.g., against a tag of the bispecific single chain antibody molecule of the invention or as described in the appended examples.

[0393] The conditions for the culturing of a host, which allow the expression are known in the art to depend on the host system and the expression system/vector used in such process. The parameters to be modified in order to achieve conditions allowing the expression of a recombinant polypeptide are known in the art. Thus, suitable conditions can be determined by the person skilled in the art in the absence of further inventive input.

[0394] Once expressed, the bispecific single chain antibody molecule of the invention can be purified according to standard procedures of the art, including ammonium sulfate precipitation, affinity columns, column chromatography, gel electrophoresis and the like; see, Scopes, “Protein Purification”, Springer-Verlag, N.Y. (1982). Substantially pure polypeptides of at least about 90 to 95% homogeneity are preferred, and 98 to 99% or more homogeneity are most preferred, for pharmaceutical uses. Once purified, partially or to homogeneity as desired, the bispecific single chain antibody molecule of the invention may then be used therapeutically (including extracorporeally) or in developing and performing assay procedures. Furthermore, examples for methods for the recovery of the bispecific single chain antibody molecule of the invention from a culture are described in detail in the appended examples. The recovery can also be achieved by a method for the isolation of the bispecific single chain antibody molecule of the invention capable of binding to an epitope of human and non-chimpanzee primate CD3 epsilon (CD3ε□, the method comprising the steps of:
[0395] (a) contacting the polypeptide(s) with an N-terminal fragment of the extracellular domain of CD3ε of maximal 27 amino acids comprising the amino acid sequence Gin-Asp-Gly-Asn-Glu-Glu-Met-Gly (SEQ ID NO. 341) or Gln-Asp-Gly-Asn-Glu-GluIle-Gly (SEQ ID NO. 342), fixed via its C-terminus to a solid phase;
[0396] (b) eluting the bound polypeptide(s) from said fragment; and
[0397] (c) isolating the polypeptide(s) from the eluate of (b).

[0398] It is preferred that the polypeptide(s) isolated by the above method of the invention are human.

[0399] This method or the isolation of the bispecific single chain antibody molecule of the invention is understood as a method for the isolation of one or more different polypeptides with the same specificity for the fragment of the extracellular domain of CD3ε comprising at its N-terminus the amino acid sequence Gln-Asp-Gly-Asn-GluGlu-Met-Gly (SEQ ID NO. 341) or Gin-Asp-Gly-Asn-Glu-Glu-Ile-Gly (SEQ ID NO. 342) from a plurality of polypeptide candidates as well as a method for the purification of a polypeptide from a solution. A non-limiting example for the latter method for the purification of a bispecific single chain antibody molecule from a solution is e.g. the purification of a recombinantly expressed bispecific single chain antibody molecule from a culture supernatant or a preparation from such culture.

[0400] As stated above the fragment used in this method is an N-terminal fragment of the extracellular domain of the primate CD3ε molecule. The amino acid sequence of the extracellular domain of the CD3ε molecule of different species is depicted in SEQ ID NOs: 1, 3, 5 and 7. The two forms of the N-terminal octamer are depicted in SEQ ID NOs: 341 and 342. It is preferred that this N-terminus is freely available for binding of the polypeptides to be identified by the method of the invention. The term “freely available” is understood in the context of the invention as free of additional motives such as a His-tag. The interference of such a His-tag with a binding molecule identified by the method of the invention is described in the appended Examples 6 and 20.

[0401] According to this method said fragment is fixed via its C-terminus to a solid phase. The person skilled in the art will easily and without any inventive ado elect a suitable solid phase support dependent from the used embodiment of the method of the invention. Examples for a solid support comprise but are not limited to matrices like beads (e.g. agarose beads, sepharose beads, polystyrol beads, dextran beads), plates (culture plates or MultiWell plates) as well as chips known e.g. from Biacore®. The selection of the means and methods for the fixation/immobilization of the fragment to said solid support depend on the election of the solid support. A commonly used method for the fixation/immobilization is a coupling via an Nhydroxysuccinimide (NHS) ester. The chemistry underlying this coupling as well as alternative methods for the fixation/immobilization are known to the person skilled in the art, e.g. from Hermanson “Bioconjugate Techniques”, Academic Press, Inc. (1996). For the fixation to/immobilization on chromatographic supports the following means are commonly used: NHS-activated sepharose (e.g. HiTrap-NHS of GE Life Science-Amersham), CnBr-activated sepharose (e.g. GE Life Science-Amersham), NHS-activated dextran beads (Sigma) or activated polymethacrylate. These reagents may also be used in a batch approach. Moreover, dextran beads comprising iron oxide (e.g. available from Miltenyi) may be used in a batch approach. These beads may be used in combination with a magnet for the separation of the beads from a solution. Polypeptides can be immobilized on a Biacore chip (e.g. CM5 chips) by the use of NHS activated carboxymethyldextran. Further examples for an appropriate solid support are amine reactive MultiWell plates (e.g. Nunc Immobilizer™ plates). According to this method said fragment of the extracellular domain of CD3 epsilon can be directly coupled to the solid support or via a stretch of amino acids, which might be a linker or another protein/polypeptide moiety. Alternatively, the extracellular domain of CD3 epsilon can be indirectly coupled via one or more adaptor molecule(s).

[0402] Means and methods for the eluation of a peptide or polypeptide bound to an immobilized epitope are well known in the art. The same holds true for methods for the isolation of the identified polypeptide(s) from the eluate.

[0403] A method for the isolation of one or more different bispecific single chain antibody molecule(s) with the same specificity for the fragment of the extracellular domain of CD3ε comprising at its N-terminus the amino acid sequence Gln-Asp-Gly-Asn-Glu-Glu-X-Gly (with X being Met or lie) from a plurality of polypeptide candidates may comprise one or more steps of the following methods for the selection of antigen-specific entities:

[0404] CD3ε specific binding domains can be selected from antibody derived repertoires. A phage display library can be constructed based on standard procedures, as for example disclosed in “Phage Display: A Laboratory Manual”; Ed. Barbas, Burton, Scott & Silverman; Cold Spring Harbor Laboratory Press, 2001. The format of the antibody fragments in the antibody library can be scFv, but may generally also be a Fab fragment or even a single domain antibody fragment. For the isolation of antibody fragments naïve antibody fragment libraries may be used. For the selection of potentially low immunogenic binding entities in later therapeutic use, human antibody fragment libraries may be favourable for the direct selection of human antibody fragments. In some cases they may form the basis for synthetic antibody libraries (Knappik et al. J Mol. Biol. 2000, 296:57 ff). The corresponding format may be Fab, scFv (as described below) or domain antibodies (dAbs, as reviewed in Holt et al., Trends Biotechnol. 2003, 21:484 ff).

[0405] It is also known in the art that in many cases there is no immune human antibody source available against the target antigen. Therefore animals are immunized with the target antigen and the respective antibody libraries isolated from animal tissue as e.g. spleen or PBMCs. The N-terminal fragment may be biotinylated or covalently linked to proteins like KLH or bovine serum albumin (BSA). According to common approaches rodents are used for immunization. Some immune antibody repertoires of non-human origin may be especially favourable for other reasons, e.g. for the presence of single domain antibodies (VHH) derived from cameloid species (as described in Muyldermans, J Biotechnol. 74:277; De Genst et al. Dev Como Immunol. 2006, 30:187 ff). Therefore a corresponding format of the antibody library may be Fab, scFv (as described below) or single domain antibodies (VHH).

[0406] In one possible approach ten weeks old F1 mice from balb/c×C57black crossings can be immunized with whole cells e.g. expressing transmembrane EpCAM N-terminally displaying as translational fusion the N-terminal amino acids 1 to 27 of the mature CD3ε chain. Alternatively, mice can be immunized with 1-27 CD3 epsilon-Fc fusion protein (a corresponding approach is described in the appended Example 2). After booster immunization(s), blood samples can be taken and antibody serum titer against the CD3-positive T cells can be tested e.g. in FACS analysis. Usually, serum titers are significantly higher in immunized than in non-immunized animals.

[0407] Immunized animals may form the basis for the construction of immune antibody libraries. Examples of such libraries comprise phage display libraries. Such libraries may be generally constructed based on standard procedures, as for example disclosed in “Phage Display: A Laboratory Manual”; Ed. Barbas, Burton, Scott & Silverman; Cold Spring Harbor Laboratory Press, 2001.

[0408] The non-human antibodies can also be humanized via phage display due to the generation of more variable antibody libraries that can be subsequently enriched for binders during selection.

[0409] In a phage display approach any one of the pools of phages that displays the antibody libraries forms a basis to select binding entities using the respective antigen as target molecule. The central step in which antigen specific, antigen bound phages are isolated is designated as panning. Due to the display of the antibody fragments on the surface of the phages, this general method is called phage display. One preferred method of selection is the use of small proteins such as the filamentous phage N2 domain translationally fused to the N-terminus of the scFv displayed by the phage. Another display method known in the art, which may be used to isolate binding entities is the ribosome display method (reviewed in Groves & Osbourn, Expert Opin Biol Ther. 2005, 5:125 ff; Lipovsek & Pluckthun, J Immunol Methods 2004, 290:52 ff). In order to demonstrate binding of scFv phage particles to a 1-27 CD3ε-Fc fusion protein a phage library carrying the cloned scFv-repertoire can be harvested from the respective culture supernatant by PEG (polyethyleneglycole). ScFv phage particles may be incubated with immobilized CD3ε Fc fusion protein. The immobilized CD3ε Fc fusion protein may be coated to a solid phase. Binding entities can be eluted and the eluate can be used for infection of fresh uninfected bacterial hosts. Bacterial hosts successfully transduced with a phagemid copy, encoding a human scFv-fragment, can be selected again for carbenicillin resistance and subsequently infected with e.g. VCMS 13 helper phage to start the second round of antibody display and in vitro selection. A total of 4 to 5 rounds of selections is carried out, normally. The binding of isolated binding entities can be tested on CD3 epsilon positive Jurkat cells, HPBall cells, PBMCs or transfected eukaryotic cells that carry the N-terminal CD3ε sequence fused to surface displayed EpCAM using a flow cytometric assay (see appended Example 4).

[0410] Preferably, the above method may be a method, wherein the fragment of the extracellular domain of CD3ε consists of one or more fragments of a polypeptide having an amino acid sequence of any one depicted in SEQ ID NOs. 2, 4, 6 or 8. More preferably, said fragment is 8, 9, 10, 11, 12, 13, 14, 15, 16, 17, 18, 19, 20, 21, 22, 23, 24, 25, 26, or 27 amino acid residues in length.

[0411] This method of identification of a bispecific single chain antibody molecule may be a method of screening a plurality of bispecific single chain antibody molecules comprising a cross-species specific binding domain binding to an epitope of human and non-chimpanzee primate CD3ε. Alternatively, the method of identification is a method of purification/isolation of a bispecific single chain antibody molecule comprising a cross-species specific binding domain binding to an epitope of human and non-chimpanzee primate CD3ε.

[0412] Furthermore, the invention provides for a composition comprising a bispecific single chain antibody molecule of the invention or a bispecific single chain antibody as produced by the process disclosed above. Preferably, said composition is a pharmaceutical composition.

[0413] The invention provides also for a bispecific single chain antibody molecule as defined herein, or produced according to the process as defined herein, wherein said bispecific single chain antibody molecule is for use in the prevention, treatment or amelioration of cancer or autoimmune diseases.

[0414] Preferably for a PSCA×CD3 bispecific single chain antibody molecule, said cancer is prostate cancer, bladder cancer or pancreatic cancer.

[0415] For a CD19×CD3 bispecific single chain antibody molecule it is preferred that said cancer is a B-cell malignancy, such as B-NHL (B cell non-Hodgkin Lymphoma), BALL (acute lymphoblastic B cell leukemia), B-CLL (chronic lymphocytic B cell leukemia), or Multiple Myeloma (wherein the bispecific single chain antibody molecule of the invention advantageously depletes CD19-positive cancer stem cells/cancer initiating cells). However, the bispecific single chain antibody molecule is also for use in the prevention, treatment or amelioration of B-cell mediated autoimmune diseases or autoimmune diseases with a pathogenic B cell contribution such as rheumatoid arthritis or the depletion of B-cells.

[0416] For a c-MET×CD3 bispecific single chain antibody molecule it is preferred that said cancer is a carcinoma, sarcoma, glioblastoma/astrocytoma, melanoma, mesothelioma, Wilms tumor or a hematopoietic malignancy such as leukemia, lymphoma or multiple myeloma. A comprehensive list of various cancer types which may be treated with the bispecific single chain antibody can be found e.g. in http://www.vai.org/met/.

[0417] For an Endosialin×CD3 bispecific single chain antibody molecule it is preferred that said cancer includes, but is not limited to, carcinomas (breast, kidney, lung, colorectal, colon, pancreas mesothelioma), sarcomas, and neuroectodermal tumors (melanoma, glioma, neuroblastoma).

[0418] For an EpCAM×CD3 bispecific single chain antibody molecule it is preferred that said cancer is epithelial cancer or a minimal residual cancer.

[0419] For a FAPα×CD3 bispecific single chain antibody molecule it is preferred that said cancer is epithelial cancer.

[0420] For a IGF-1R×CD3 bispecific single chain antibody molecule it is preferred that said cancer is bone or soft tissue cancer (e.g. Ewing sarcoma), breast, liver, lung, head and neck, colorectal, prostate, leiomyosarcoma, cervical and endometrial cancer, ovarian, prostate, and pancreatic cancer. Alternatively, the IGF-1R×CD3 bispecific single chain antibody molecule of the invention is also used in the prevention, treatment or amelioration of autoimmune diseases, preferably psoriasis.

[0421] It is preferred that the bispecific single chain is further comprising suitable formulations of carriers, stabilizers and/or excipients. Moreover, it is preferred that said bispecific single chain antibody molecule is suitable to be administered in combination with an additional drug. Said drug may be a non-proteinaceous compound or a proteinaceous compound and may be administered simultaneously or non-simultaneously with the bispecific single chain antibody molecule as defined herein.

[0422] In accordance with the invention, the term “pharmaceutical composition” relates to a composition for administration to a patient, preferably a human patient. The particular preferred pharmaceutical composition of this invention comprises bispecific single chain antibodies directed against and generated against context-independent CD3 epitopes. Preferably, the pharmaceutical composition comprises suitable formulations of carriers, stabilizers and/or excipients. In a preferred embodiment, the pharmaceutical composition comprises a composition for parenteral, transdermal, intraluminal, intraarterial, intrathecal and/or intranasal administration or by direct injection into tissue. It is in particular envisaged that said composition is administered to a patient via infusion or injection. Administration of the suitable compositions may be effected by different ways, e.g., by intravenous, intraperitoneal, subcutaneous, intramuscular, topical or intradermal administration. In particular, the present invention provides for an uninterrupted administration of the suitable composition. As a non-limiting example, uninterrupted, i.e. continuous administration may be realized by a small pump system worn by the patient for metering the influx of therapeutic agent into the body of the patient. The pharmaceutical composition comprising the bispecific single chain antibodies directed against and generated against context-independent CD3 epitopes of the invention can be administered by using said pump systems. Such pump systems are generally known in the art, and commonly rely on periodic exchange of cartridges containing the therapeutic agent to be infused. When exchanging the cartridge in such a pump system, a temporary interruption of the otherwise uninterrupted flow of therapeutic agent into the body of the patient may ensue. In such a case, the phase of administration prior to cartridge replacement and the phase of administration following cartridge replacement would still be considered within the meaning of the pharmaceutical means and methods of the invention together make up one “uninterrupted administration” of such therapeutic agent.

[0423] The continuous or uninterrupted administration of these bispecific single chain antibodies directed against and generated against context-independent CD3 epitopes of this invention may be intravenuous or subcutaneous by way of a fluid delivery device or small pump system including a fluid driving mechanism for driving fluid out of a reservoir and an actuating mechanism for actuating the driving mechanism. Pump systems for subcutaneous administration may include a needle or a cannula for penetrating the skin of a patient and delivering the suitable composition into the patient's body. Said pump systems may be directly fixed or attached to the skin of the patient independently of a vein, artery or blood vessel, thereby allowing a direct contact between the pump system and the skin of the patient. The pump system can be attached to the skin of the patient for 24 hours up to several days. The pump system may be of small size with a reservoir for small volumes. As a non-limiting example, the volume of the reservoir for the suitable pharmaceutical composition to be administered can be between 0.1 and 50 ml.

[0424] The continuous administration may be transdermal by way of a patch worn on the skin and replaced at intervals. One of skill in the art is aware of patch systems for drug delivery suitable for this purpose. It is of note that transdermal administration is especially amenable to uninterrupted administration, as exchange of a first exhausted patch can advantageously be accomplished simultaneously with the placement of a new, second patch, for example on the surface of the skin immediately adjacent to the first exhausted patch and immediately prior to removal of the first exhausted patch. Issues of flow interruption or power cell failure do not arise.

[0425] The composition of the present invention, comprising in particular bispecific single chain antibodies directed against and generated against context-independent CD3 epitopes may further comprise a pharmaceutically acceptable carrier. Examples of suitable pharmaceutical carriers are well known in the art and include solutions, e.g. phosphate buffered saline solutions, water, emulsions, such as oil/water emulsions, various types of wetting agents, sterile solutions, liposomes, etc. Compositions comprising such carriers can be formulated by well known conventional methods. Formulations can comprise carbohydrates, buffer solutions, amino acids and/or surfactants. Carbohydrates may be non-reducing sugars, preferably trehalose, sucrose, octasulfate, sorbitol or xylitol. Such formulations may be used for continuous administrations which may be intravenuous or subcutaneous with and/or without pump systems. Amino acids may be charged amino acids, preferably lysine, lysine acetate, arginine, glutamate and/or histidine. Surfactants may be detergents, preferably with a molecular weight of >1.2 KD and/or a polyether, preferably with a molecular weight of >3 KD. Non-limiting examples for preferred detergents are Tween 20, Tween 40, Tween 60, Tween 80 or Tween 85. Non-limiting examples for preferred polyethers are PEG 3000, PEG 3350, PEG 4000 or PEG 5000. Buffer systems used in the present invention can have a preferred pH of 5-9 and may comprise citrate, succinate, phosphate, histidine and acetate. The compositions of the present invention can be administered to the subject at a suitable dose which can be determined e.g. by dose escalating studies by administration of increasing doses of the bispecific single chain antibody molecule of the invention exhibiting cross-species specificity described herein to non-chimpanzee primates, for instance macaques. As set forth above, the bispecific single chain antibody molecule of the invention exhibiting cross-species specificity described herein can be advantageously used in identical form in preclinical testing in non-chimpanzee primates and as drug in humans. These compositions can also be administered in combination with other proteinaceous and non-proteinaceous drugs. These drugs may be administered simultaneously with the composition comprising the bispecific single chain antibody molecule of the invention as defined herein or separately before or after administration of said polypeptide in timely defined intervals and doses. The dosage regimen will be determined by the attending physician and clinical factors. As is well known in the medical arts, dosages for any one patient depend upon many factors, including the patient's size, body surface area, age, the particular compound to be administered, sex, time and route of administration, general health, and other drugs being administered concurrently. Preparations for parenteral administration include sterile aqueous or non-aqueous solutions, suspensions, and emulsions. Examples of non-aqueous solvents are propylene glycol, polyethylene glycol, vegetable oils such as olive oil, and injectable organic esters such as ethyl oleate. Aqueous carriers include water, alcoholic/aqueous solutions, emulsions or suspensions, including saline and buffered media. Parenteral vehicles include sodium chloride solution, Ringer's dextrose, dextrose and sodium chloride, lactated Ringer's, or fixed oils. Intravenous vehicles include fluid and nutrient replenishers, electrolyte replenishers (such as those based on Ringer's dextrose), and the like. Preservatives and other additives may also be present such as, for example, antimicrobials, anti-oxidants, chelating agents, inert gases and the like. In addition, the composition of the present invention might comprise proteinaceous carriers, like, e.g., serum albumin or immunoglobulin, preferably of human origin. It is envisaged that the composition of the invention might comprise, in addition to the bispecific single chain antibody molecule of the invention defined herein, further biologically active agents, depending on the intended use of the composition. Such agents might be drugs acting on the gastro-intestinal system, drugs acting as cytostatica, drugs preventing hyperurikemia, drugs inhibiting immunoreactions (e.g. corticosteroids), drugs modulating the inflammatory response, drugs acting on the circulatory system and/or agents such as cytokines known in the art.

[0426] The biological activity of the pharmaceutical composition defined herein can be determined for instance by cytotoxicity assays, as described in the following examples, in WO 99/54440 or by Schlereth et al. (Cancer Immunol. Immunother. 20 (2005), 1-12). “Efficacy” or “in vivo efficacy” as used herein refers to the response to therapy by the pharmaceutical composition of the invention, using e.g. standardized NCI response criteria. The success or in vivo efficacy of the therapy using a pharmaceutical composition of the invention refers to the effectiveness of the composition for its intended purpose, i.e. the ability of the composition to cause its desired effect, i.e. depletion of pathologic cells, e.g. tumor cells. The in vivo efficacy may be monitored by established standard methods for the respective disease entities including, but not limited to white blood cell counts, differentials, Fluorescence Activated Cell Sorting, bone marrow aspiration. In addition, various disease specific clinical chemistry parameters and other established standard methods may be used. Furthermore, computer-aided tomography, X-ray, nuclear magnetic resonance tomography (e.g. for National Cancer Institute-criteria based response assessment [Cheson BD, Horning S J, Coiffier B, Shipp M A, Fisher R I, Connors J M, Lister T A, Vose J, Grillo-Lopez A, Hagenbeek A, Cabanillas F, Klippensten D, Hiddemann W, Castellino R, Harris N L, Armitage J O, Carter W, Hoppe R, Canellos G P. Report of an international workshop to standardize response criteria for non-Hodgkin's lymphomas. NCI Sponsored International Working Group. J Clin Oncol. 1999 April;17(4):1244]), positron-emission tomography scanning, white blood cell counts, differentials, Fluorescence Activated Cell Sorting, bone marrow aspiration, lymph node biopsies/histologies, and various cancer specific clinical chemistry parameters (e.g. lactate dehydrogenase) and other established standard methods may be used.

[0427] Another major challenge in the development of drugs such as the pharmaceutical composition of the invention is the predictable modulation of pharmacokinetic properties. To this end, a pharmacokinetic profile of the drug candidate, i.e. a profile of the pharmacokinetic parameters that effect the ability of a particular drug to treat a given condition, is established. Pharmacokinetic parameters of the drug influencing the ability of a drug for treating a certain disease entity include, but are not limited to: half-life, volume of distribution, hepatic first-pass metabolism and the degree of blood serum binding. The efficacy of a given drug agent can be influenced by each of the parameters mentioned above.

[0428] “Half-life” means the time where 50% of an administered drug are eliminated through biological processes, e.g. metabolism, excretion, etc.

[0429] By “hepatic first-pass metabolism” is meant the propensity of a drug to be metabolized upon first contact with the liver, i.e. during its first pass through the liver. “Volume of distribution” means the degree of retention of a drug throughout the various compartments of the body, like e.g. intracellular and extracellular spaces, tissues and organs, etc. and the distribution of the drug within these compartments. “Degree of blood serum binding” means the propensity of a drug to interact with and bind to blood serum proteins, such as albumin, leading to a reduction or loss of biological activity of the drug.

[0430] Pharmacokinetic parameters also include bioavailability, lag time (Tlag), Tmax, absorption rates, more onset and/or Cmax for a given amount of drug administered. “Bioavailability” means the amount of a drug in the blood compartment.

[0431] “Lag time” means the time delay between the administration of the drug and its detection and measurability in blood or plasma.

[0432] “Tmax” is the time after which maximal blood concentration of the drug is reached, and “Cmax” is the blood concentration maximally obtained with a given drug. The time to reach a blood or tissue concentration of the drug which is required for its biological effect is influenced by all parameters. Pharmacokinetik parameters of bispecific single chain antibodies exhibiting cross-species specificity, which may be determined in preclinical animal testing in non-chimpanzee primates as outlined above are also set forth e.g. in the publication by Schlereth et al. (Cancer Immunol. Immunother. 20 (2005), 1-12).

[0433] The term “toxicity” as used herein refers to the toxic effects of a drug manifested in adverse events or severe adverse events. These side events might refer to a lack of tolerability of the drug in general and/or a lack of local tolerance after administration. Toxicity could also include teratogenic or carcinogenic effects caused by the drug.

[0434] The term “safety”, “in vivo safety” or “tolerability” as used herein defines the administration of a drug without inducing severe adverse events directly after administration (local tolerance) and during a longer period of application of the drug. “Safety”, “in vivo safety” or “tolerability” can be evaluated e.g. at regular intervals during the treatment and follow-up period. Measurements include clinical evaluation, e.g. organ manifestations, and screening of laboratory abnormalities. Clinical evaluation may be carried out and deviating to normal findings recorded/coded according to NCI-CTC and/or MedDRA standards. Organ manifestations may include criteria such as allergy/immunology, blood/bone marrow, cardiac arrhythmia, coagulation and the like, as set forth e.g. in the Common Terminology Criteria for adverse events v3.0 (CTCAE). Laboratory parameters which may be tested include for instance haematology, clinical chemistry, coagulation profile and urine analysis and examination of other body fluids such as serum, plasma, lymphoid or spinal fluid, liquor and the like. Safety can thus be assessed e.g. by physical examination, imaging techniques (i.e. ultrasound, x-ray, CT scans, Magnetic Resonance Imaging (MRI), other measures with technical devices (i.e. electrocardiogram), vital signs, by measuring laboratory parameters and recording adverse events. For example, adverse events in non-chimpanzee primates in the uses and methods according to the invention may be examined by histopathological and/or histochemical methods.

[0435] The term “effective and non-toxic dose” as used herein refers to a tolerable dose of the bispecific single chain antibody as defined herein which is high enough to cause depletion of pathologic cells, tumor elimination, tumor shrinkage or stabilization of disease without or essentially without major toxic effects. Such effective and non-toxic doses may be determined e.g. by dose escalation studies described in the art and should be below the dose inducing severe adverse side events (dose limiting toxicity, DLT).

[0436] The above terms are also referred to e.g. in the Preclinical safety evaluation of biotechnology-derived pharmaceuticals S6; ICH Harmonised Tripartite Guideline; ICH Steering Committee meeting on Jul. 16, 1997.

[0437] Moreover, the invention relates to a pharmaceutical composition comprising a bispecific single chain antibody molecule of this invention or produced according to the process according to the invention for the prevention, treatment or amelioration of cancer or autoimmune diseases.

[0438] Preferably, said cancer is for a PSCA×CD3 bispecific single chain antibody molecule prostate cancer, bladder cancer or pancreatic cancer.

[0439] Preferably, said cancer is for a CD19×CD3 bispecific single chain antibody molecule a B-cell malignancy such as non-Hodgkin Lymphoma, B-cell mediated autoimmune diseases or the depletion of B-cells.

[0440] Preferably, said cancer is for a c-MET×CD3 bispecific single chain antibody molecule is a carcinoma, sarcoma, glioblastoma/astrocytoma, melanoma, mesothelioma, Wilms tumor or a hematopoietic malignancy such as leukemia, lymphoma or multiple myeloma.

[0441] Preferably, said cancer is for an Endosialin×CD3 bispecific single chain antibody molecule a carcinoma (breast, kidney, lung, colorectal, colon, pancreas mesothelioma), a sarcoma, or a neuroectodermal tumor (melanoma, glioma, neuroblastoma).

[0442] Preferably, said cancer is for an EpCAM×CD3 bispecific single chain antibody molecule epithelial cancer or a minimal residual cancer.

[0443] Preferably, said cancer is for a FAPα×CD3 bispecific single chain antibody molecule epithelial cancer.

[0444] Preferably, said cancer is for a an IGF-1R×CD3 bispecific single chain antibody molecule bone or soft tissue cancer (e.g. Ewing sarcoma), breast, liver, lung, head and neck, colorectal, prostate, leiomyosarcoma, cervical and endometrial cancer, ovarian, prostate, and pancreatic cancer. Alternatively, the IGF-1R×CD3 bispecific single chain antibody molecule/polypeptide as defined herein above is also used in the prevention, treatment or amelioration of autoimmune diseases, preferably psoriasis.

[0445] Preferably, said pharmaceutical composition further comprises suitable formulations of carriers, stabilizers and/or excipients.

[0446] A further aspect of the invention relates to a use of a bispecific single chain antibody molecule/polypeptide as defined herein above or produced according to a process defined herein above, for the preparation of a pharmaceutical composition for the prevention, treatment or amelioration of a disease. Preferably, said disease is cancer or autoimmune diseases.

[0447] More preferably for a PSCA×CD3 bispecific single chain antibody molecule/polypeptide as defined herein above, said cancer is prostate cancer, bladder cancer or pancreatic cancer.

[0448] More preferably for a CD19×CD3 bispecific single chain antibody molecule/polypeptide as defined herein above, said cancer is a B-cell malignancy such as non-Hodgkin Lymphoma, B-cell mediated autoimmune diseases or the depletion of B-cells.

[0449] More preferably for a c-MET×CD3 bispecific single chain antibody molecule/polypeptide as defined herein above, said cancer is a carcinoma, sarcoma, glioblastoma/astrocytoma, melanoma, mesothelioma, Wilms tumor or a hematopoietic malignancy such as leukemia, lymphoma or multiple myeloma.

[0450] More preferably for an Endosialin×CD3 bispecific single chain antibody molecule/polypeptide as defined herein above, said cancer is a carcinoma (breast, kidney, lung, colorectal, colon, pancreas mesothelioma), a sarcoma, or a neuroectodermal tumor (melanoma, glioma, neuroblastoma).

[0451] More preferably for an EpCAM×CD3 bispecific single chain antibody molecule/polypeptide as defined herein above, said cancer is epithelial cancer or a minimal residual cancer.

[0452] More preferably for a FAPα×CD3 bispecific single chain antibody molecule/polypeptide as defined herein above, said cancer is epithelial cancer.

[0453] More preferably for an IGF-1R×CD3 bispecific single chain antibody molecule/polypeptide as defined herein above, said cancer is bone or soft tissue cancer (e.g. Ewing sarcoma), breast, liver, lung, head and neck, colorectal, prostate, leiomyosarcoma, cervical and endometrial cancer, ovarian, prostate, and pancreatic cancer. Alternatively, the IGF-1R×CD3 bispecific single chain antibody molecule/polypeptide as defined herein above is also used in the prevention, treatment or amelioration of autoimmune diseases, preferably psoriasis.

[0454] In another preferred embodiment of use of the bispecific single chain antibody molecule of the invention said pharmaceutical composition is suitable to be administered in combination with an additional drug, i.e. as part of a co-therapy. In said co-therapy, an active agent may be optionally included in the same pharmaceutical composition as the bispecific single chain antibody molecule of the invention, or may be included in a separate pharmaceutical composition. In this latter case, said separate pharmaceutical composition is suitable for administration prior to, simultaneously as or following administration of said pharmaceutical composition comprising the bispecific single chain antibody molecule of the invention. The additional drug or pharmaceutical composition may be a non-proteinaceous compound or a proteinaceous compound. In the case that the additional drug is a proteinaceous compound, it is advantageous that the proteinaceous compound be capable of providing an activation signal for immune effector cells.

[0455] Preferably, said proteinaceous compound or non-proteinaceous compound may be administered simultaneously or non-simultaneously with the bispecific single chain antibody molecule of the invention, a nucleic acid molecule as defined hereinabove, a vector as defined as defined hereinabove, or a host as defined as defined hereinabove.

[0456] Another aspect of the invention relates to a method for the prevention, treatment or amelioration of a disease in a subject in the need thereof, said method comprising the step of administration of an effective amount of a pharmaceutical composition of the invention. Preferably, said disease is cancer or autoimmune diseases.

[0457] More preferably for a PSCA×CD3 bispecific single chain antibody molecule/polypeptide as defined herein above,, said cancer is prostate cancer, bladder cancer or pancreatic cancer.

[0458] More preferably for a CD19×CD3 bispecific single chain antibody molecule/polypeptide as defined herein above, said cancer is a B-cell malignancy such as non-Hodgkin Lymphoma, B-cell mediated autoimmune diseases or the depletion of B-cells.

[0459] More preferably for a c-MET×CD3 bispecific bispecific single chain antibody molecule/polypeptide as defined herein above, said cancer is a carcinoma, sarcoma, glioblastoma/astrocytoma, melanoma, mesothelioma, Wilms tumor or a hematopoietic malignancy such as leukemia, lymphoma or multiple myeloma.

[0460] More preferably for an Endosialin×CD3 bispecific bispecific single chain antibody molecule/polypeptide as defined herein above, said cancer is a carcinoma (breast, kidney, lung, colorectal, colon, pancreas mesothelioma), a sarcoma, or a neuroectodermal tumor (melanoma, glioma, neuroblastoma).

[0461] More preferably for an EpCAM×CD3 bispecific single chain antibody molecule/polypeptide as defined herein above, said cancer is epithelial cancer or a minimal residual cancer.

[0462] More preferably for a FAPα×CD3 bispecific single chain antibody molecule/polypeptide as defined herein above, said cancer is epithelial cancer

[0463] More preferably for an IGF-1R×CD3 bispecific single chain antibody molecule/polypeptide as defined herein above, said cancer is bone or soft tissue cancer (e.g. Ewing sarcoma), breast, liver, lung, head and neck, colorectal, prostate, leiomyosarcoma, cervical and endometrial cancer, ovarian, prostate, and pancreatic cancer. Alternatively, the IGF-1R×CD3 bispecific single chain antibody molecule/polypeptide as defined herein above is also used in the prevention, treatment or amelioration of autoimmune diseases, preferably psoriasis.

[0464] In another preferred embodiment of the method of the invention said pharmaceutical composition is suitable to be administered in combination with an additional drug, i.e. as part of a co-therapy. In said co-therapy, an active agent may be optionally included in the same pharmaceutical composition as the bispecific single chain antibody molecule of the invention, or may be included in a separate pharmaceutical composition. In this latter case, said separate pharmaceutical composition is suitable for administration prior to, simultaneously as or following administration of said pharmaceutical composition comprising the bispecific single chain antibody molecule of the invention. The additional drug or pharmaceutical composition may be a non-proteinaceous compound or a proteinaceous compound. In the case that the additional drug is a proteinaceous compound, it is advantageous that the proteinaceous compound be capable of providing an activation signal for immune effector cells.

[0465] Preferably, said proteinaceous compound or non-proteinaceous compound may be administered simultaneously or non-simultaneously with the bispecific single chain antibody molecule of the invention, a nucleic acid molecule as defined hereinabove, a vector as defined as defined hereinabove, or a host as defined as defined hereinabove.

[0466] It is preferred for the above described method of the invention that said subject is a human.

[0467] In a further aspect, the invention relates to a kit comprising a bispecific single chain antibody molecule of the invention, a nucleic acid molecule of the invention, a vector of the invention, or a host of the invention.

[0468] These and other embodiments are disclosed and encompassed by the description and Examples of the present invention. Recombinant techniques and methods in immunology are described e.g. in Sambrook et al. Molecular Cloning: A Laboratory Manual; Cold Spring Harbor Laboratory Press, 3^{rd} edition 2001; Lefkovits; Immunology Methods Manual; The Comprehensive Sourcebook of Techniques; Academic Press, 1997; Golemis; Protein-Protein Interactions: A Molecular Cloning Manual; Cold Spring Laboratory Press, 2002. Further literature concerning any one of the antibodies, methods, uses and compounds to be employed in accordance with the present invention may be retrieved from public libraries and databases, using for example electronic devices. For example, the public database “Medline”, available on the Internet, may be utilized, for example under http://www.ncbi.nlm.nih.gov/PubMed/medline.html. Further databases and addresses such as http://www.ncbi.nlm.nih.gov/or listed at the EMBL-services homepage under http://www.embl.de/services/index.html are known to the person skilled in the art and can also be obtained using, e. g., http://www.google.com.

[0469] The figures show:

[0470] FIG. 1

[0471] Fusion of the N-terminal amino acids 1-27 of primate CD3 epsilon to a heterologous soluble protein.

[0472] FIG. 2

[0473] The figure shows the average absorption values of quadruplicate samples measured in an ELISA assay detecting the presence of a construct consisting of the N-terminal amino acids 1-27 of the mature human CD3 epsilon chain fused to the hinge and Fc gamma portion of human IgG1 and a C-terminal 6 Histidine tag in a supernatant of transiently transfected 293 cells. The first column labeled “27 aa huCD3ε” shows the average absorption value for the construct, the second column labeled “irrel. SN” shows the average value for a supernatant of 293 cells transfected with an irrelevant construct as negative control. The comparison of the values obtained for the construct with the values obtained for the negative control clearly demonstrates the presence of the recombinant construct.

[0474] FIG. 3

[0475] The figure shows the average absorption values of quadruplicate samples measured in an ELISA assay detecting the binding of the cross species specific anti-CD3 binding molecules in form of crude preparations of periplasmatically expressed single-chain antibodies to a construct comprising the N-terminal 1-27 amino acids of the mature human CD3 epsilon chain fused to the hinge and Fc gamma portion of human IgG1 and a C-terminal His6 tag. The columns show from left to right the average absorption values for the specificities designated as A2J HLP, I2C HLP E2M HLP, F70 HLP, G4H HLP, H2C HLP, E1L HLP, F12Q HLP, F6A HLP and H1E HLP. The rightmost column labelled “neg. contr.” shows the average absorption value for the single-chain preparation of a murine anti-human CD3 antibody as negative control. The comparison of the values obtained for the anti-CD3 specificities with the values obtained for the negative control clearly demonstrates the strong binding of the anti-CD3 specificities to the N-terminal 1-27 amino acids of the mature human CD3 epsilon chain.

[0476] FIG. 4

[0477] Fusion of the N-terminal amino acids 1-27 of primate CD3 epsilon to a heterologous membrane bound protein.

[0478] FIG. 5

[0479] Histogram overlays of different transfectants tested in a FACS assay detecting the presence of recombinant transmembrane fusion proteins consisting of cynomolgus EpCAM and the N-terminal 1-27 amino acids of the human, marmoset, tamarin, squirrel monkey and domestic swine CD3 epsilon chain respectively. The histogram overlays from left to right and top to bottom show the results for the transfectants expressing the constructs comprising the human 27 mer, marmoset 27 mer, tamarin 27 mer, squirrel monkey 27 mer and swine 27 mer respectively. In the individual overlays the thin line represents a sample incubated with PBS with 2% FCS instead of anti-Flag M2 antibody as negative control and the bold line shows a sample incubated with the anti-Flag M2 antibody. For each construct the overlay of the histograms shows binding of the anti-Flag M2 antibody to the transfectants, which clearly demonstrates the expression of the recombinant constructs on the transfectants.

[0480] FIGS. 6A-6E

[0481] Histogram overlays of different transfectants tested in a FACS assay detecting the binding of the cross-species specific anti-CD3 binding molecules in form of crude preparations of periplasmatically expressed single-chain antibodies to the N-terminal amino acids 1-27 of the human, marmoset, tamarin and squirrel monkey CD3 epsilon chain respectively fused to cynomolgus EpCAM.

[0482] FIG. 6A:

[0483] The histogram overlays from left to right and top to bottom show the results for the transfectants expressing the 1-27 CD3-EpCAM comprising the human 27 mer tested with the CD3 specific binding molecules designated H2C HLP, F12Q HLP, E2M HLP and G4H HLP respectively.

[0484] FIG. 6B:

[0485] The histogram overlays from left to right and top to bottom show the results for the transfectants expressing the 1-27 CD3-EpCAM comprising the marmoset 27 mer tested with the CD3 specific binding molecules designated H2C HLP, F12Q HLP, E2M HLP and G4H HLP respectively.

[0486] FIG. 6C:

[0487] The histogram overlays from left to right and top to bottom show the results for the transfectants expressing the 1-27 CD3-EpCAM comprising the tamarin 27 mer tested with the CD3 specific binding molecules designated H2C HLP, F12Q HLP, E2M HLP and G4H HLP respectively.

[0488] FIG. 6D:

[0489] The histogram overlays from left to right and top to bottom show the results for the transfectants expressing the 1-27 CD3-EpCAM comprising the squirrel monkey 27 mer tested with the CD3 specific binding molecules designated H2C HLP, F12Q HLP, E2M HLP and G4H HLP respectively.

[0490] FIG. 6E:

[0491] The histogram overlays from left to right and top to bottom show the results for the transfectants expressing the 1-27 CD3-EpCAM comprising the swine 27 mer tested with the CD3 specific binding molecules designated H2C HLP, F12Q HLP, E2M HLP and G4H HLP respectively.

[0492] In the individual overlays the thin line represents a sample incubated with a single-chain preparation of a murine anti-human CD3-antibody as negative control and the bold line shows a sample incubated with the respective anti-CD3 binding molecules indicated. Considering the lack of binding to the swine 27 mer transfectants and the expression levels of the constructs shown in FIG. 5 the overlays of the histograms show specific and strong binding of the tested anti-CD3 specificities of the fully cross-species specific human bispecific single chain antibodies to cells expressing the recombinant transmembrane fusion proteins comprising the N-terminal amino acids 1-27 of the human, marmoset, tamarin and squirrel monkey CD3 epsilon chain respectively fused to cynomolgus EpCAM and show therefore multi primate cross-species specificity of the anti-CD3 binding molecules.

[0493] FIG. 7

[0494] FACS assay for detection of human CD3 epsilon on transfected murine EL4 T cells. Graphical analysis shows an overlay of histograms. The bold line shows transfected cells incubated with the anti-human CD3 antibody UCHT-1. The thin line represents cells incubated with a mouse IgG1 isotype control. Binding of the anti CD3 antibody UCHT1 clearly shows expression of the human CD3 epsilon chain on the cell surface of transfected murine EL4 T cells.

[0495] FIGS. 8A-8D

[0496] Binding of cross-species specific anti CD3 antibodies to alanine-mutants in an alanine scanning experiment. In the individual Figures the columns show from left to right the calculated binding values in arbitrary units in logarithmic scale for the wild-type transfectant (WT) and for all alanine-mutants from the position 1 to 27. The binding values are calculated using the following formula:

$$value\_Sample ( x , y ) = \frac{Sample ( x , y ) - neg\_Contr . ( x )}{( UCHT - 1 ( x ) - neg\_Contr . ( x ) ) * \frac{WT ( y ) - neg\_Contr . ( wt )}{UCHT - 1 ( wt ) - neg\_Contr . ( wt )}}$$

[0497] In this equation value_Sample means the value in arbitrary units of binding depicting the degree of binding of a specific anti-CD3 antibody to a specific alanine-mutant as shown in the Figure, Sample means the geometric mean fluorescence value obtained for a specific anti-CD3 antibody assayed on a specific alanine-scanning transfectant, neg_Contr. means the geometric mean fluorescence value obtained for the negative control assayed on a specific alanine-mutant, UCHT-1 means the geometric mean fluorescence value obtained for the UCHT-1 antibody assayed on a specific alanine-mutant, WT means the geometric mean fluorescence value obtained for a specific anti-CD3 antibody assayed on the wild-type transfectant, x specifies the respective transfectant, y specifies the respective anti-CD3 antibody and wt specifies that the respective transfectant is the wild-type. Individual alanine-mutant positions are labelled with the single letter code of the wild-type amino acid and the number of the position.

[0498] FIG. 8A:

[0499] The figure shows the results for cross-species specific anti CD3 antibody A2J HLP expressed as chimeric IgG molecule. Reduced binding activity is observed for mutations to alanine at position 4 (asparagine), at position 23 (threonine) and at position 25 (isoleucine). Complete loss of binding is observed for mutations to alanine at position 1 (glutamine), at position 2 (aspartate), at position 3 (glycine) and at position 5 (glutamate).

[0500] FIG. 8B:

[0501] The figure shows the results for cross-species specific anti CD3 antibody E2M HLP, expressed as chimeric IgG molecule. Reduced binding activity is observed for mutations to alanine at position 4 (asparagine), at position 23 (threonine) and at position 25 (isoleucine). Complete loss of binding is observed for mutations to alanine at position 1 (glutamine), at position 2 (aspartate), at position 3 (glycine) and at position 5 (glutamate).

[0502] FIG. 8C:

[0503] The figure shows the results for cross-species specific anti CD3 antibody H2C HLP, expressed as chimeric IgG molecule. Reduced binding activity is observed for mutations to alanine at position 4 (asparagine). Complete loss of binding is observed for mutations to alanine glutamine at position 1 (glutamine), at position 2 (aspartate), at position 3 (glycine) and at position 5 (glutamate).

[0504] FIG. 8D:

[0505] shows the results for cross-species specific anti CD3 antibody F12Q HLP, tested as periplasmatically expressed single-chain antibody. Complete loss of binding is observed for mutations to alanine at position 1 (glutamine), at position 2 (aspartate), at position 3 (glycine) and at position 5 (glutamate).

[0506] FIG. 9

[0507] FACS assay detecting the binding of the cross-species specific anti-CD3 binding molecule H2C HLP to human CD3 with and without N-terminal His6 tag.

[0508] Histogram overlays are performed of the EL4 cell line transfected with wild-type human CD3 epsilon chain (left histogram) or the human CD3 epsilon chain with N-terminal His6 tag (right histogram) tested in a FACS assay detecting the binding of cross-species specific binding molecule H2C HLP. Samples are incubated with an appropriate isotype control as negative control (thin line), anti-human CD3 antibody UCHT-1 as positive control (dotted line) and cross-species specific anti-CD3 antibody H2C HLP in form of a chimeric IgG molecule (bold line).

[0509] Histogram overlays show comparable binding of the UCHT-1 antibody to both transfectants as compared to the isotype control demonstrating expression of both recombinant constructs. Histogram overlays also show binding of the anti-CD3 binding molecule H2C HLP only to the wild-type human CD3 epsilon chain but not to the His6-human CD3 epsilon chain. These results demonstrate that a free N-terminus is essential for binding of the cross-species specific anti-CD3 binding molecule H2C HLP.

[0510] FIG. 10

[0511] FACS binding analysis of designated cross-species specific bispecific single chain constructs to CHO cells transfected with the human MCSP D3, human CD3+ T cell line HPB-ALL, CHO cells transfected with cynomolgus MCSP D3 and a macaque T cell line 4119 LnPx. The FACS staining is performed as described in Example 10. The thick line represents cells incubated with 2 μg/ml purified protein that are subsequently incubated with the anti-his antibody and the PE labeled detection antibody. The thin histogram line reflects the negative control: cells only incubated with the anti-his antibody and the detection antibody.

[0512] FIG. 11

[0513] FACS binding analysis of designated cross-species specific bispecific single chain constructs CHO cells transfected with the human MCSP D3, human CD3+ T cell line HPB-ALL, CHO cells transfected with cynomolgus MCSP D3 and a macaque T cell line 4119 LnPx. The FACS staining is performed as described in Example 10. The thick line represents cells incubated with 2 μg/ml purified protein that are subsequently incubated with the anti-his antibody and the PE labeled detection antibody. The thin histogram line reflects the negative control: cells only incubated with the anti-his antibody and the detection antibody.

[0514] FIG. 12

[0515] FACS binding analysis of designated cross-species specific bispecific single chain constructs CHO cells transfected with the human MCSP D3, human CD3+ T cell line HPB-ALL, CHO cells transfected with cynomolgus MCSP D3 and a macaque T cell line 4119 LnPx. The FACS staining is performed as described in Example 10. The thick line represents cells incubated with 2 μg/ml purified monomeric protein that are subsequently incubated with the anti-his antibody and the PE labeled detection antibody. The thin histogram line reflects the negative control: cells only incubated with the anti-his antibody and the detection antibody.

[0516] FIGS. 13A-13B

[0517] Cytotoxicity activity induced by designated cross-species specific MCSP specific single chain constructs redirected to indicated target cell lines. FIG. 13A Stimulated CD4-/CD56-human PBMCs are used as effector cells, CHO cells transfected with human MCSP D3 as target cells. FIG. 13B The macaque T cell line 4119 LnPx are used as effector cells, CHO cells transfected with cynomolgus MCSP D3 as target cells. The assay is performed as described in Example 11.

[0518] FIGS. 14A-14B

[0519] Cytotoxicity activity induced by designated cross-species specific MCSP specific single chain constructs redirected to indicated target cell lines. FIGS. 14A-B The macaque T cell line 4119 LnPx are used as effector cells, CHO cells transfected with cynomolgus MCSP D3 as target cells. The assay is performed as described in Example 11.

[0520] FIGS. 15A-15B

[0521] Cytotoxicity activity induced by designated cross-species specific MCSP specific single chain constructs redirected to indicated target cell lines. FIGS. 15A-15B Stimulated CD4-/CD56-human PBMCs are used as effector cells, CHO cells transfected with human MCSP D3 as target cells. The assay is performed as described in Example 11.

[0522] FIGS. 16A-16B

[0523] Cytotoxicity activity induced by designated cross-species specific MCSP specific single chain constructs redirected to indicated target cell lines. FIG. 16A Stimulated CD4-/CD56-human PBMCs are used as effector cells, CHO cells transfected with human MCSP D3 as target cells. FIG. 16B The macaque T cell line 4119 LnPx are used as effector cells, CHO cells transfected with cynomolgus MCSP D3 as target cells. The assay is performed as described in Example 11.

[0524] FIG. 17A-17B

[0525] Cytotoxicity activity induced by designated cross-species specific MCSP specific single chain constructs redirected to indicated target cell lines. A) Stimulated CD4-/CD56-human PBMCs are used as effector cells, CHO cells transfected with human MCSP D3 as target cells. B) The macaque T cell line 4119 LnPx are used as effector cells, CHO cells transfected with cynomolgus MCSP D3 as target cells. The assay is performed as described in Example 11.

[0526] FIGS. 18A-18C

[0527] Plasma stability of MCSP and CD3 cross-species specific bispecific single chain antibodies tested by the measurement of cytotoxicity activity induced by samples of the designated single chain constructs incubated with 50% human plasma at 37° C. and 4° C. for 24 hours respectively or with addition of 50% human plasma immediately prior to cytotoxicity testing or without addition of plasma. CHO cells transfected with human MCSP are used as target cell line and stimulated CD4-/CD56-human PBMCs are used as effector cells. The assay is performed as described in Example 12.

[0528] FIGS. 19A-19F

[0529] Initial drop and recovery (i.e. redistribution) of absolute T cell counts (open squares), in peripheral blood of B-NHL patients (patent numbers 1, 7, 23, 30, 31, and 33 of Table 4), who had essentially no circulating CD19-positive target B cells (filled triangles), during the starting phase of intravenous infusion with the CD3 binding molecule CD19×CD3 recognizing a conventional context dependent CD3 epitope. Absolute cell counts are given in 1000 cells per microliter blood. The first data point shows baseline counts immediately prior to the start of infusion. The CD19×CD3 dose is given in parentheses beside the patient number.

[0530] FIGS. 20A-20B

[0531] FIG. 20A Repeated T cell redistribution (open squares) in B-NHL patient #19 (Table 4) who had no circulating CD19-positive target B cells (filled triangles) and developed CNS symptoms under continuous intravenous infusion with CD19×CD3 at a starting dose of 5 μg/m²/24 h for one day followed by a sudden dose increase to 15 μg/m²/24 h. Absolute cell counts are given in 1000 cells per microliter blood. The first data point shows baseline counts immediately prior to the start of infusion. After recovery of circulating T cells from the first episode of redistribution triggered by the treatment start at 5 μg/m²/24 h the stepwise dose increase from 5 to 15 μg/m²/24 h triggered a second episode of T cell redistribution that was associated with the development of CNS symptoms dominated by confusion and disorientation.

[0532] FIG. 20B Repeated T cell redistribution in a B-NHL patient, who developed CNS symptoms under repeated intravenous bolus infusion with CD19×CD3 at 1.5 μg/m². Absolute cell counts are given in 1000 cells per microliter blood. The infusion time for each bolus administration was 2 to 4 hours. Vertical arrows indicate the start of bolus infusions. Data points at the beginning of each bolus administration show the T cell counts immediately prior to start of bolus infusion. Each bolus infusion triggered an episode of T cell redistribution followed by recovery of the T cell counts prior to the next bolus infusion. Finally the third episode of T cell redistribution was associated with the development of CNS symptoms in this patient.

[0533] FIG. 21

[0534] Complex T cell redistribution pattern (open squares) in B-NHL patient #20 (Table 4) without circulating CD19-positive target B cells (filled triangles), during ramp initiation of the CD19×CD3 infusion i.e. even gradual increase of flow-rate from almost zero to 15 μg/m²/24 h during the first 24 hours of treatment. Absolute cell counts are given in 1000 cells per microliter blood. The first data point shows baseline counts immediately prior to the start of infusion. The CD19×CD3 dose is given in parentheses beside the patient number. T cells reappearing in the circulating blood after the initial redistribution triggered by the first exposure to CD19×CD3 are partially induced to redisappear from circulating blood again by still increasing levels of CD19×CD3 during the ramp phase.

[0535] FIG. 22

[0536] T and B cell counts during treatment with CD19×CD3 of B-NHL patient #13 (Table 4) who had a significant number of circulating CD19-positive target B (lymphoma) cells (filled triangles). Absolute cell counts are given in 1000 cells per microliter blood. The first data point shows baseline counts immediately prior to the start of infusion. The CD19×CD3 dose is given in parentheses beside the patient number. T cells (open squares) disappear completely from the circulation upon start of CD19×CD3 infusion and do not reappear until the circulating CD19-positive B (lymphoma) cells (filled triangles) are depleted from the peripheral blood.

[0537] FIG. 23

[0538] Repeated T cell redistribution (open squares) in B-NHL patient #24 (Table 4), who had essentially no circulating CD19-positive target B cells (filled triangles) and developed CNS symptoms upon initiation of CD19×CD3 infusion without additional HSA as required for stabilisation of the drug (upper panel). After first recovery of circulating T cells from initial redistribution the uneven drug flow due to the lack of stabilizing HSA triggered a second episode of T cell redistribution that was associated with the development of CNS symptoms dominated by confusion and disorientation. When the same patient was restarted correctly with CD19×CD3 solution containing additional HSA for drug stabilisation, no repeated T cell redistribution was observed (lower panel) and the patient did not again develop any CNS symptoms. Absolute cell counts are given in 1000 cells per microliter blood. The first data point shows baseline counts immediately prior to the start of infusion. The CD19×CD3 dose is given in parentheses beside the patient number.

[0539] FIG. 24

[0540] Model of T cell adhesion to endothelial cells induced by monovalent binding to context dependent CD3 epitopes. Monovalent interaction of a conventional CD3 binding molecule to its context dependent epitope on CD3 epsilon can lead to an allosteric change in the conformation of CD3 followed by the recruitment of Nck2 to the cytoplasmic domain of CD3 epsilon (Gil et al. (2002) Cell 109: 901). As Nck2 is directly linked to integrins via PINCH and ILK (Legate et al. (2006) Nat Rev Mol Cell Biol 7: 20), recruitment of Nck2 to the cytoplasmic domain of CD3 epsilon following an allosteric change in the conformation of CD3 through binding of a conventional CD3 binding molecule (like the CD19×CD3 of example 13) to its context dependent epitope on CD3 epsilon, can increase the adhesiveness of T cells to endothelial cells by transiently switching integrins on the T cell surface into their more adhesive isoform via inside-out-signalling.

[0541] FIG. 25

[0542] Cytotoxic activity of CD33-AF5 VH-VL×I2C VH-VL test material used for the in vivo study in cynomolgus monkeys as described in Example 14. Specific lysis of CD33-positive target cells was determined in a standard ⁵¹Chromium release assay at increasing concentrations of CD33-AF5 VH-VL× I2C VH-VL. Assay duration was 18 hours. The macaque T cell line 4119 LnPx was used as source of effector cells. CHO cells transfected with cynomolgus CD33 served as target cells. Effector- to target cell ratio (E:T-ratio) was 10:1. The concentration of CD33-AF5 VH-VL× I2C VH-VL required for half-maximal target cell lysis (EC50) was calculated from the dose response curve with a value of 2.7 ng/ml.

### FIGS. 26A-26B

[0543] FIG. 26A Dose- and time-dependent depletion of CD33-positive monocytes from the peripheral blood of cynomolgus monkeys through intravenous continuous infusion of CD33-AF5 VH-VL× I2C VH-VL as described in Example 14. The percentage relative to baseline (i.e. 100%) of absolute circulating CD33-positive monocyte counts after the duration of treatment as indicated above the columns is shown for each of two cynomolgus monkeys per dose level. The dose level (i.e. infusion flow-rate) is indicated below the columns. No depletion of circulating CD33-positive monocytes was observed in animals 1 and 2 treated for 7 days at a dose of 30 μg/m²/24 h. In animals 3 and 4 treated for 7 days at a dose of 60 μg/m²/24 h circulating CD33-positive monocyte counts were reduced to 68% and 40% of baseline, respectively. At 240 μg/m²/24 h circulating CD33-positive monocytes were almost completely depleted from the peripheral blood after 3 days of treatment (animals 5 and 6). At 1000 μg/m²/24 h depletion of circulating CD33-positive monocytes from the peripheral blood was completed already after 1 day of treatment (animals 7 and 8).

[0544] FIG. 26B Course of T cell and CD33-monocyte counts in peripheral blood of two cynomolgus monkeys during continuous infusion of CD33-AF5 VH-VL× I2C VH-VL for 14 days at 120 μg/m²/24 h. Absolute cell counts are given in 1000 cells per microliter blood. The first data point shows baseline counts immediately prior to the start of infusion. After initial mobilisation of CD33-monocytes during the first 12 hours upon start of infusion CD33-monocytes in peripheral blood (filled triangles) are depleted by two thirds (animal 10) and 50% (animal 9) relative to the respective baseline counts during the further course of infusion. Circulating T cell counts (open squares) show a limited initial drop followed by recovery still during the presence of circulating CD33-positive monocytic target cells.

[0545] FIG. 27

[0546] Cytotoxic activity of MCSP-G4 VH-VL× I2C VH-VL test material used for the in vivo study in cynomolgus monkeys as described in Example 15. Specific lysis of MCSP-positive target cells was determined in a standard ⁵¹Chromium release assay at increasing concentrations of MCSP-G4 VH-VL× I2C VH-VL. Assay duration was 18 hours. The macaque T cell line 4119 LnPx was used as source of effector cells. CHO cells transfected with cynomolgus MCSP served as target cells. Effector- to target cell ratio (E:T-ratio) was 10:1. The concentration of MCSP-G4 VH-VL× I2C VH-VL required for half-maximal target cell lysis (EC50) was calculated from the dose response curve with a value of 1.9 ng/ml.

[0547] FIGS. 28A-28B

[0548] Absence of initial episodes of drop and subsequent recovery of absolute T cell counts (i.e. redistribution) in peripheral blood of cynomolgus monkeys during the starting phase of intravenous infusion with the CD3 binding molecule MCSP-G4 VH-VL× I2C VH-VL recognizing an essentially context independent CD3 epitope. Absolute cell counts are given in 1000 cells per microliter blood. The first data point shows baseline counts immediately prior to the start of infusion. The MCSP-G4 VH-VL×I2C VH-VL dose is given in parentheses beside the animal number. In the known absence of MCSP-positive target cells from the circulating blood of cynomolgus monkeys there is no induction of T cell redistribution (i.e. an initial episode of drop and subsequent recovery of absolute T cell counts) through target cell mediated crosslinking of CD3. Moreover, induction of T cell redistribution (i.e. an initial episode of drop and subsequent recovery of absolute T cell counts) through a signal, which the T cells may receive through exclusive interaction with a CD3 binding site only, can be avoided by the use of CD3 binding molecules like MCSP-G4 VH-VL× I2C VH-VL recognizing an essentially context independent CD3 epitope.

[0549] FIGS. 29A-29L

[0550] FACS binding analysis of designated cross-species specific bispecific constructs to CHO cells transfected with human CD33, the human CD3+ T cell line HPB-ALL, CHO cells transfected with macaque CD33 and macaque PBMC respectively. The FACS staining is performed as described in Example 16.4. The bold lines represent cells incubated with 5 μg/ml purified bispecific single chain construct or cell culture supernatant of transfected cells expressing the cross-species specific bispecific antibody constructs. The filled histograms reflect the negative controls. Supernatant of untransfected CHO cells was used as negative control. For each cross-species specific bispecific single chain construct the overlay of the histograms shows specific binding of the construct to human and macaque CD33 and human and macaque CD3.

[0551] FIGS. 30A-30H

[0552] The diagrams show results of chromium release assays measuring cytotoxic activity induced by designated cross-species specific CD33 specific single chain constructs redirected to the indicated target cell lines. Effector cells were also used as indicated. The assays are performed as described in Example 16.5. The diagrams clearly demonstrate for each construct the potent recruitment of cytotoxic activity of human and macaque effector cells against human and macaque CD33 transfected CHO cells, respectively.

[0553] FIG. 31

[0554] SDS PAGE gel and Western blot monitoring the purification of the cross-species specific bispecific single chain molecule designated E292F3 HL×I2C HL. Samples from the eluate, the cell culture supernatant (SN) and the flow through of the column (FT) were analyzed as indicated. A protein marker (M) was applied as size reference. A strong protein band with a molecular weight between 50 and 60 kDa in the SDS PAGE gel demonstrates the efficient purification of the cross-species specific bispecific single chain molecule to a very high degree of purity with the one-step purification method described in Example 17.2. The Western blot detecting the histidinee tag confirms the identity of the protein band in the eluate as the cross-species specific bispecific single chain molecule. The faint signal for the flow through sample in this sensitive detection method further shows the nearly complete capture of bispecific single chain molecules by the purification method.

[0555] FIG. 32

[0556] SDS PAGE gel and Western blot monitoring the purification of the cross-species specific bispecific single chain molecule designated V207C12 HL×H2C HL. Samples from the eluate, the cell culture supernatant (SN) and the flow through of the column (FT) were analyzed as indicated. A protein marker (M) was applied as size reference. A strong protein band with a molecular weight between 50 and 60 kDa in the SDS PAGE gel demonstrates the efficient purification of the cross-species specific bispecific single chain molecule to a very high degree of purity with the one-step purification method described in Example 17.2. The Western blot detecting the histidinee tag confirms the identity of the protein band in the eluate as the cross-species specific bispecific single chain molecule. The faint signal for the flow through sample in this sensitive detection method further shows the nearly complete capture of bispecific single chain molecules by the purification method.

[0557] FIG. 33

[0558] SDS PAGE gel and Western blot monitoring the purification of the cross-species specific bispecific single chain molecule designated AF5HL×F12QHL. Samples from the eluate, the cell culture supernatant (SN) and the flow through of the column (FT) were analyzed as indicated. A protein marker (M) was applied as size reference. A strong protein band with a molecular weight between 50 and 60 kDa in the SDS PAGE gel demonstrates the efficient purification of the cross-species specific bispecific single chain molecule to a very high degree of purity with the one-step purification method described in Example 17.2. The Western blot detecting the histidine₆ tag confirms the identity of the protein band in the eluate as the cross-species specific bispecific single chain molecule. The signal in the flow through sample in this sensitive detection method is explained by saturation of the affinity column due to the high concentration of bispecific single chain molecules in the supernatant.

[0559] FIG. 34

[0560] Standard curve of AF5HL×l2CHL in 50% macaque monkey serum. The upper diagram shows the standard curve generated for the assay as described in Example 18.2.

[0561] The lower diagram shows results for quality control samples of AF5HL×l2CHL in 50% macaque monkey serum. The recovery rates are above 90% for the high and mid QC sample and above 80% for the low QC sample.

[0562] Thus the assay allows for detection of AF5HL×l2CHL in serum samples in the range from 10 ng/ml to 200 ng/ml (before dilution).

[0563] FIG. 35

[0564] Standard curve of MCSP-G4 HL×I2C HL in 50% macaque monkey serum. The upper diagram shows the standard curve generated for the assay as described in Example 18.2.

[0565] The lower diagram shows results for quality control samples of MCSP-G4 HL×I2C HL in 50% macaque monkey serum. The recovery rates are above 98% for the high and mid QC sample and above 85% for the low QC sample.

[0566] Thus the assay allows for detection of MCSP-G4 HL×I2C HL in serum samples in the range from 10 ng/ml to 200 ng/ml (before dilution).

[0567] FIG. 36

[0568] FACS binding analysis of an anti-Flag antibody to CHO cells transfected with the 1-27 N-terminal amino acids of CD3 epsilon of the designated species fused to cynomolgus EpCAM. The FACS staining was performed as described in Example 19.1. The bold lines represent cells incubated with the anti-Flag antibody. The filled histograms reflect the negative controls. PBS with 2% FCS was used as negative control. The histograms show strong and comparable binding of the anti-Flag antibody to all transfectants indicating strong and equal expression of the transfected constructs.

[0569] FIG. 37

[0570] FACS binding analysis of the I2C IgG1 construct to CHO cells expressing the 1-27 N-terminal amino acids of CD3 epsilon of the designated species fused to cynomolgus EpCAM. The FACS staining is performed as described in Example 19.3. The bold lines represent cells incubated with 50 μl cell culture supernatant of cells expressing the I2C IgG1 construct. The filled histograms reflect the negative control. Cells expressing the 1-27 N-terminal amino acids of CD3 epsilon of swine fused to cynomolgus EpCAM were used as negative control. In comparison with the negative control the histograms clearly demonstrate binding of the I2C IgG1 construct to 1-27 N-terminal amino acids of CD3 epsilon of human, marmoset, tamarin and squirrel monkey.

[0571] FIG. 38

[0572] FACS binding analysis of the I2C IgG1 construct as described in Example 19.2 to human CD3 with and without N-terminal His6 tag as described in Examples 6.1 and 5.1 respectively. The bold lines represent cells incubated with the anti-human CD3 antibody UCHT-1, the penta-His antibody (Qiagen) and cell culture supernatant of cells expressing the I2C IgG1 construct respectively as indicated. The filled histograms reflect cells incubated with an irrelevant murine IgG1 antibody as negative control.

[0573] The upper two histogram overlays show comparable binding of the UCHT-1 antibody to both transfectants as compared to the isotype control demonstrating expression of both recombinant constructs. The centre histogram overlays show binding of the penta his antibody to the cells expressing the His6-human CD3 epsilon chain (His6-CD3) but not to the cells expressing the wild-type CD3 epsilon chain (WT-CD3). The lower Histogram overlays show binding of the I2C IgG1 construct to the wild-type human CD3 epsilon chain but not to the His6-human CD3 epsilon chain. These results demonstrate that a free N-terminus is essential for binding of the cross-species specific anti-CD3 binding molecule I2C to the CD3 epsilon chain.

[0574] FIGS. 39A-39L

[0575] FACS binding analysis of designated cross-species specific bispecific single chain constructs to CHO cells transfected with human MCSP D3, the human CD3+ T cell line HPB-ALL, CHO cells transfected with macaque MCSP D3 and the macaque T cell line 4119 LnPx respectively. The FACS staining was performed as described in Example 10. The bold lines represents cells incubated with 2 μg/ml purified bispecific single chain construct or cell supernatant containing the bispecific single chain construct respectively. The filled histograms reflect the negative controls. Supernatant of untransfected CHO cells was used as negative control for binding to the T cell lines. A single chain construct with irrelevant target specificity was used as negative control for binding to the MCSP D3 transfected CHO cells. For each cross-species specific bispecific single chain construct the overlay of the histograms shows specific binding of the construct to human and macaque MCSP D3 and human and macaque CD3.

[0576] FIGS. 40A-40D

[0577] Cytotoxic activity induced by designated cross-species specific MCSP D3 specific single chain constructs redirected to the indicated target cell lines. Effector cells and effector to target ratio were also used as indicated. The assay is performed as described in Example 11. The diagrams clearly demonstrate potent cross-species specific recruitment of cytotoxic activity by each construct.

[0578] FIGS. 41A-41B

[0579] FACS binding analysis of designated cross-species specific bispecific single chain constructs to CHO cells transfected with human CD33, the human CD3+ T cell line HPB-ALL, CHO cells transfected with macaque CD33 and macaque PBMC respectively. The FACS staining was performed as described in Example 21.2. The bold lines represent cells incubated with cell culture supernatant of transfected cells expressing the cross-species specific bispecific antibody constructs. The filled histograms reflect the negative controls. Supernatant of untransfected CHO cells was used as negative control. For each cross-species specific bispecific single chain construct the overlay of the histograms shows specific binding of the construct to human and macaque CD33 and human and macaque CD3.

[0580] FIG. 42

[0581] The diagrams show results of chromium release assays measuring cytotoxic activity induced by designated cross-species specific CD33 specific single chain constructs redirected to the indicated target cell lines. Effector cells were also used as indicated. The assays are performed as described in Example 21.3. The diagrams clearly demonstrate for each construct the potent recruitment of cytotoxic activity of human and macaque effector cells against human and macaque CD33 transfected CHO cells, respectively.

[0582] FIG. 43

[0583] T cell redistribution in a chimpanzee under weekly intravenous bolus infusion with PBS/5% HSA and PBS/5% HSA plus single-chain EpCAM/CD3-bispecific antibody construct at doses of 1.6, 2.0, 3.0 and 4.5 μg/kg. The infusion time for each bolus administration was 2 hours. Vertical arrows indicate the start of bolus infusions. Data points at the beginning of each bolus administration show the T cell counts immediately prior to start of bolus infusion. Each bolus infusion of the single-chain EpCAM/CD3-bispecific antibody construct, which recognizes a conventional context dependent CD3 epitope, triggered an episode of T cell redistribution followed by recovery of T cells to baseline values prior to the next bolus infusion.

[0584] FIG. 44

[0585] CD3 specific ELISA analysis of periplasmic preparations containing Flag tagged scFv protein fragments from selected clones. Periplasmic preparations of soluble scFv protein fragments were added to wells of an ELISA plate, which had been coated with soluble human CD3 epsilon (aa 1-27)-Fc fusion protein and had been additionally blocked with PBS 3% BSA. Detection was performed by a monoclonal anti Flag-Biotin-labeled antibody followed by peroxidase-conjugated Streptavidin. The ELISA was developed by an ABTS substrate solution. The OD values (y axis) were measured at 405 nm by an ELISA reader. Clone names are presented on the x axis.

[0586] FIG. 45

[0587] ELISA analysis of periplasmic preparations containing Flag tagged scFv protein fragments from selected clones. The same periplasmic preparations of soluble scFv protein fragments as in FIG. 44 were added to wells of an ELISA plate which had not been coated with human CD3 epsilon (aa 1-27)-Fc fusion protein but with hulgG1 (Sigma) and blocked with 3% BSA in PBS.

[0588] Detection was performed by a monoclonal anti Flag-Biotin-labeled antibody followed by peroxidase-conjugated Streptavidin. The ELISA was developed by an ABTS substrate solution. The OD values (y axis) were measured at 405 nm by an ELISA reader. Clone names are presented on the x axis.

[0589] FIGS. 46A-46G

[0590] FIGS. 46A-G: FACS binding analysis of designated cross-species specific bispecific single chain constructs to CHO cells transfected with human PSCA, the human CD3+ T cell line HPB-ALL, CHO cells transfected with macaque PSCA and to the macaque T cell line 4119LnPx, respectively. The FACS staining was performed as described in Example 24.5. The bold lines represent cells incubated with cell culture supernatant of transfected cells expressing the cross-species specific bispecific antibody constructs. The filled histograms reflect the negative controls. Supernatant of untransfected cells was used as a negative control. For each cross-species specific bispecific single chain construct the overlay of the histograms shows specific binding of the construct to human and macaque PSCA and human and macaque CD3.

[0591] FIGS. 47A-47C

[0592] FIG. 47A-C: The diagrams show results of chromium release assays measuring cytotoxic activity induced by the designated cross-species specific bispecific single chain constructs redirected to the indicated target cell lines. Effector cells were also used as indicated. The assays were performed as described in Example 24.6. The diagrams clearly demonstrate for each construct the potent recruitment of cytotoxic activity of human and macaque effector cells against cells positive for human and macaque PSCA, respectively.

[0593] FIGS. 48A-48D

[0594] FACS binding analysis of designated cross-species specific bispecific single chain constructs to CHO cells transfected with human PSCA, the human CD3+ T cell line HPB-ALL, CHO cells transfected with macaque PSCA and to the macaque T cell line 4119LnPx, respectively. The FACS staining was performed as described in Example 45.5. The bold lines represent cells incubated with cell culture supernatant of transfected cells expressing the cross-species specific bispecific antibody constructs. The filled histograms show the negative controls. Supernatant of untransfected cells was used as negative control. For each cross-species specific bispecific single chain construct the overlay of the histograms shows specific binding of the construct to human and macaque PSCA and human and macaque CD3.

[0595] FIGS. 49A-49B

[0596] The diagrams show results of chromium release assays measuring cytotoxic activity induced by designated cross-species specific bispecific single chain constructs redirected to the indicated target cell lines. Effector cells were also used as indicated. The assays were performed as described in Example 24.6. The diagrams clearly demonstrate for each construct the potent recruitment of cytotoxic activity of human and macaque effector T cells against target cells positive for human and macaque PSCA, respectively.

[0597] FIGS. 50A-501

[0598] FACS binding analysis of designated cross-species specific bispecific single chain constructs to CHO cells transfected with human CD19, the human CD3-positive T cell line HPB-ALL, and the CD3-positive macaque T cell line 4119 LnPx. The FACS staining is performed as described in Example 25.4. The thick-line histograms represent cells incubated with cell culture supernatant and subsequently with a murine anti-His-tag antibody followed by a PE-labeled anti-murine Ig detection antibody. The thin-lined histograms represent the negative control i.e. cells only incubated with the anti-His-tag antibody and the anti-murine Ig detection antibody.

[0599] FIGS. 51A-511

[0600] Cytotoxic T cell activity redirected by designated cross-species specific bispecific single chain constructs against the indicated target cell line. A) Stimulated CD4/CD56-depleted human PBMCs are used as effector T cells and CHO cells transfected with human CD19 as target cells. B) The macaque T cell line 4119 LnPx is used as source of effector cells and CHO cells transfected with human CD19 are used as target cells. The assay is performed as described in Example 25.5.

[0601] FIGS. 52A-52E

[0602] FACS binding analysis of the designated cross-species specific bispecific single chain constructs to the C-MET positive human breast cancer cell line MDA-MB-231, the human CD3+ T cell line HPB-ALL and to the macaque CD3+ T cell line 4119LnPx respectively. The FACS staining was performed as described in Example 26.5. The bold lines represent cells incubated with cell culture supernatant of transfected cells expressing the cross-species specific bispecific antibody constructs. The filled histograms represent the negative controls. Supernatant of untransfected cells was used as a negative control. For each cross-species specific bispecific single chain construct the overlay of the histograms shows specific binding of the construct to C-MET and human and macaque CD3.

[0603] FIGS. 53A-53B

[0604] The diagrams show results of chromium release assays measuring cytotoxic activity induced by the designated cross-species specific bispecific single chain constructs redirected to the indicated target cell lines. Effector cells were also used as indicated. The assays were performed as described in Example 26.6. The diagrams clearly demonstrate for each construct the potent recruitment of cytotoxic activity of human effector cells against cells positive for C-MET.

[0605] FIGS. 54A-54D

[0606] FACS binding analysis of designated cross-species specific bispecific single chain constructs to CHO cells expressing human cMET as described in Example 27.1, the human CD3+ T cell line HPB-ALL, CHO cells expressing macaque cMET as described in Example 27.1 and the macaque T cell line 4119LnPx, respectively. The FACS staining was performed as described in Example 27.2. The bold lines represent cells incubated with cell culture supernatant of transfected cells expressing the cross-species specific bispecific antibody constructs. The filled histograms show the negative controls. Supernatant of untransfected CHO cells was used as negative control. For each cross-species specific bispecific single chain construct the overlay of the histograms shows specific binding of the construct to human and macaque cMET and human and macaque CD3.

[0607] FIGS. 55A-55B

[0608] The diagrams show results of chromium release assays measuring cytotoxic activity induced by designated cross-species specific cMET specific single chain constructs redirected to the indicated target cell line generated as described in Example 27.1. Effector cells were also used as indicated. The assays were performed as described in Example 27.4. The diagrams clearly demonstrate for each construct the potent recruitment of cytotoxic activity of macaque effector T cells against target cells positive for macaque cMET.

[0609] FIGS. 56A-56C

[0610] FACS binding analysis of designated cross-species specific scFv antibodies to CHO cells expressing human cMET as described in Example 27.1 and CHO cells expressing macaque cMET as described in Example 27.1, respectively. The FACS staining was performed as described in Example 27.3. The bold lines represent cells incubated with periplasmic preparations containing the cross-species specific scFv antibodies. The filled histograms show the negative controls. The Buffer used for periplasmic preparations was used as negative control. For each cross-species specific scFv antibody the overlay of the histograms shows specific binding of the construct to human and macaque cMET.

[0611] FIG. 57

[0612] FACS binding analysis of a cross-species specific scFv-antibody fragment to CHO cells transfected with human Endosialin and to CHO cells transfected with macaque Endosialin. The FACS staining was performed as described in Example 28.3. The bold lines represent cells incubated with a periplasmic preparation containing the scFv-antibody fragment. The thin lines represent the negative controls. Untransfected CHO cells were used as a negative control. The overlays of the histograms show specific binding of the scFv-antibody fragment to human and macaque Endosialin.

[0613] FIGS. 58A-58B

[0614] FACS binding analysis of designated cross-species specific bispecific single chain constructs to CHO cells transfected with human CD248, the human CD3+ T cell line HPB-ALL, CHO cells transfected with macaque CD248 and the macaque T cell line 4119LnPx, respectively. The FACS staining was performed as described in Example 29.1. The bold lines represent cells incubated with cell culture supernatant of transfected cells expressing the cross-species specific bispecific antibody constructs. The thin lines show the negative controls. Supernatant of untransfected CHO cells was used as negative control. For each cross-species specific bispecific single chain construct the overlay of the histograms shows specific binding of the construct to human and macaque CD248 and human and macaque CD3.

[0615] FIGS. 59A-59B

[0616] The diagrams show results of chromium release assays measuring cytotoxic activity induced by designated cross-species specific CD248 specific single chain constructs redirected to the indicated target cell lines. Effector cells were also used as indicated. The assays were performed as described in Example 29.1. The diagrams clearly demonstrate for each construct the potent recruitment of cytotoxic activity of human and macaque effector T cells against target cells positive for human and macaque CD248, respectively.

[0617] FIGS. 60A-60E

[0618] FACS binding analysis of designated cross-species specific bispecific single chain constructs to CHO cells transfected with human EpCAM, human CD3+ T cell line HPB-ALL, and the macaque T cell line 4119 LnPx. The FACS staining was performed as described in Example 30.4. The thick line represents cells incubated with cell culture supernatant that were subsequently incubated with the anti-his antibody and the PE labeled detection antibody. The thin histogram line shows the negative control: cells only incubated with the anti-his antibody and the detection antibody.

[0619] FIGS. 61A-61B

[0620] Cytotoxic activity induced by designated cross-species specific bispecific single chain constructs redirected to the indicated target cell lines. FIG. 61A) Stimulated CD4-/CD56-human PBMCs are used as effector cells, CHO cells transfected with human EpCAM as target cells. FIG. 61B) The macaque T cell line 4119 LnPx were used as effector cells, CHO cells transfected with human EpCAM as target cells. The assay was performed as described in Example 30.5.

[0621] FIGS. 62A-62B

[0622] Cytotoxic activity induced by designated cross-species specific bispecific single chain constructs redirected to the indicated target cell lines. FIG. 62A) Stimulated CD4-/CD56-human PBMCs are used as effector cells, CHO cells transfected with human EpCAM as target cells. FIG. 62B) The macaque T cell line 4119 LnPx were used as effector cells, CHO cells transfected with human EpCAM as target cells. The assay was performed as described in Example 30.5.

[0623] FIGS. 63A-63B

[0624] Cytotoxic activity induced by designated cross-species specific bispecific single chain constructs redirected to the indicated target cell lines. FIGS. 63A-63B Stimulated CD4-/CD56-human PBMCs are used as effector cells, CHO cells transfected with human EpCAM as target cells. The assay was performed as described in Example 30.5.

[0625] FIGS. 64A-64B and 65A-65B

[0626] Cytotoxic activity induced by designated cross-species specific bispecific single chain constructs redirected to the indicated target cell lines. A) and B) The macaque T cell line 4119 LnPx were used as effector cells, CHO cells transfected with human EpCAM as target cells. The assay was performed as described in Example 30.5

[0627] FIGS. 66A-66B

[0628] Cytotoxic activity induced by designated cross-species specific bispecific single chain constructs redirected to the indicated target cell lines. FIG. 66A) Stimulated CD4-/CD56-human PBMCs are used as effector cells, CHO cells transfected with human EpCAM as target cells. FIG. 66B) The macaque T cell line 4119 LnPx were used as effector cells, CHO cells transfected with human EpCAM as target cells. The assay was performed as described in Example 30.5

[0629] FIG. 67

[0630] FACS binding analysis of designated cross-species specific bispecific single chain constructs to CHO cells transfected with human, mouse or human-mouse hybrid EpCAM. The FACS staining was performed as described in Example 30.7. The bars represent the median fluorescence intensity of the designated constructs to the stated EpCAM antigens.

[0631] FIG. 68

[0632] In the FACS analysis, the indicated constructs showed binding to CD3 and FAPalpha compared to the negative control. Cross-species specificity of the bispecific antibodies to human and macaque CD3 and FAP alpha antigens, respectively, was demonstrated. The assay was performed as described in Example 31

[0633] FIG. 69

[0634] All of the generated cross-species specific bispecific single chain antibody constructs demonstrated cytotoxic activity against human FAPalpha positive target cells elicited by stimulated human CD4/CD56 depleted PBMC and macaque FAPalpha positive target cells elicited by the macaque T cell line 4119LnPx. The assay was performed as described in Example 31

[0635] FIGS. 70A-70B

[0636] FACS binding analysis of designated cross-species specific bispecific single chain constructs to CHO cells transfected with human FAPalpha, the human CD3+ T cell line HPB-ALL, CHO cells transfected with macaque FAPalpha and the macaque T cell line 4119LnPx, respectively. The FACS staining was performed as described in Example 32.1. The bold lines represent cells incubated with cell culture supernatant of transfected cells expressing the cross-species specific bispecific antibody constructs. The thin lines show the negative controls. Supernatant of untransfected CHO cells was used as negative control. For each cross-species specific bispecific single chain construct the overlay of the histograms shows specific binding of the construct to human and macaque FAPalpha and human and macaque CD3.

[0637] FIGS. 71A-71B

[0638] The diagrams show results of chromium release assays measuring cytotoxic activity induced by designated cross-species specific FAPalpha specific single chain constructs redirected to the indicated target cell lines. Effector cells were also used as indicated. The assays were performed as described in Example 32.1. The diagrams clearly demonstrate for each construct the potent recruitment of cytotoxic activity of human and macaque effector T cells against target cells positive for human and macaque FAPalpha, respectively.

[0639] FIGS. 72A-72B

[0640] FACS binding analysis of designated cross-species specific scFv antibodies to CHO cells transfected with human FAPalpha and CHO cells transfected with macaque FAPalpha, respectively. The FACS staining was performed as described in Example 32.2. The bold lines represent cells incubated with periplasmic preparations containing the cross-species specific scFv antibodies. The filled histograms show the negative controls. The Buffer used for periplasmic preparations was used as negative control. For each cross-species specific scFv antibody the overlay of the histograms shows specific binding of the construct to human and macaque FAPalpha.

[0641] FIGS. 73A-73H

[0642] FACS binding analysis of designated cross-species specific bispecific single chain constructs to CHO cells transfected with human IGF-1R, the human CD3+ T cell line HPB-ALL, CHO cells transfected with macaque IGF-1R and to the macaque T cell line 4119LnPx, respectively. The FACS staining was performed as described in Example 33.3. The bold lines represent cells incubated with cell culture supernatant of transfected cells expressing the cross-species specific bispecific antibody constructs. The filled histograms show the negative controls. Cell culture medium was used as negative control. For each cross-species specific bispecific single chain construct the overlay of the histograms shows specific binding of the construct to human and macaque IGF-1R and human and macaque CD3.

[0643] FIGS. 74A-74E

[0644] The diagrams show results of chromium release assays measuring cytotoxic activity induced by designated cross-species specific bispecific single chain constructs redirected to the indicated target cell lines. Effector cells were also used as indicated. The assays were performed as described in Example 33.3. The diagrams clearly demonstrate for each construct the recruitment of cytotoxic activity of human and macaque effector T cells against target cells positive for human and macaque IGF1R, respectively.

[0645] The present invention is additionally described by way of the following illustrative non-limiting examples that provide a better understanding of the present invention and of its many advantages.

### EXAMPLES

1. Identification of CD3Epsilon Sequences from Blood Samples of Non-Human Primates

[0646] Blood samples of the following non-human primates were used for CD3epsilon-identification: Callithrix jacchus, Saguinus oedipus and Saimiris ciureus. Fresh heparin-treated whole blood samples were prepared for isolating total cellular RNA according to manufacturer's protocol (QIAamp RNA Blood Mini Kit, Qiagen). The extracted mRNA was transcribed into cDNA according to published protocols. In brief, 10 μl of precipitated RNA was incubated with 1.2 μl of 10× hexanucleotide mix (Roche) at 70° C. for 10 minutes and stored on ice. A reaction mix consisting of 4 μl of 5× superscript II buffer, 0.2 μl of 0.1M dithiothreitole, 0.8 μl of superscript II (Invitrogen), 1.2 μl of desoxyribonucleoside triphosphates (25 μM), 0.8 μl of RNase Inhibitor (Roche) and 1.8 μl of DNase and RNase free water (Roth) was added. The reaction mix was incubated at room temperature for 10 minutes followed by incubation at 42° C. for 50 minutes and at 90° C. for 5 minutes. The reaction was cooled on ice before adding 0.8 μl of RNaseH (1 U/μl, Roche) and incubated for 20 minutes at 37° C.

[0647] The first-strand cDNAs from each species were subjected to separate 35-cycle polymerase chain reactions using Taq DNA polymerase (Sigma) and the following primer combination designed on database research: forward primer 5′-AGAGTTCTGGGCCTCTGC-3′ (SEQ ID NO: 253); reverse primer 5′-CGGATGGGCTCATAGTCTG-3′ (SEQ ID NO: 254);. The amplified 550 bp-bands were gel purified (Gel Extraction Kit, Qiagen) and sequenced (Sequiserve, Vaterstetten/Germany, see sequence listing).

CD3epsilon Callithrix jacchus
Nucleotides
CAGGACGGTAATGAAGAAATGGGTGATACTACACAGAACCCATAT
AAAGTTTCCATCTCAGGAACCACAGTAACACTGACATGCCCTCGG
TATGATGGACATGAAATAAAATGGCTCGTAAATAGTCAAAACAAA
GAAGGTCATGAGGACCACCTGTTACTGGAGGACTTTTCGGAAATG
GAGCAAAGTGGTTATTATGCCTGCCTCTCCAAAGAGACTCCCGCA
GAAGAGGCGAGCCATTATCTCTACCTGAAGGCAAGAGTGTGTGAG
AACTGCGTGGAGGTGGAT
Amino acids
(SEQ ID NO: 3)
QDGNEEMGDTTQNPYKVSISGTTVTLTCPRYDGHEIKWLVNSQNK
EGHEDHLLLEDFSEMEQSGYYACLSKETPAEEASHYLYLKARVCE
NCVEVD
CD3epsilon Saguinus oedipus
Nucleotides
CAGGACGGTAATGAAGAAATGGGTGATACTACACAGAACCCATAT
AAAGTTTCCATCTCAGGAACCACAGTAACACTGACATGCCCTCGG
TATGATGGACATGAAATAAAATGGCTTGTAAATAGTCAAAACAAA
GAAGGTCATGAGGACCACCTGTTACTGGAGGATTTTTCGGAAATG
GAGCAAAGTGGTTATTATGCCTGCCTCTCCAAAGAGACTCCCGCA
GAAGAGGCGAGCCATTATCTCTACCTGAAGGCAAGAGTGTGTGAG
AACTGCGTGGAGGTGGAT
Amino acids
(SEQ ID NO: 5)
QDGNEEMGDTTQNPYKVSISGTTVTLTCPRYDGHEIKWLVNSQNK
EGHEDHLLLEDFSEMEQSGYYACLSKETPAEEASHYLYLKARVCE
NCVEVD
CD3epsilon Saimiris ciureus
Nucleotides
CAGGACGGTAATGAAGAGATTGGTGATACTACCCAGAACCCATAT
AAAGTTTCCATCTCAGGAACCACAGTAACACTGACATGCCCTCGG
TATGATGGACAGGAAATAAAATGGCTCGTAAATGATCAAAACAAA
GAAGGTCATGAGGACCACCTGTTACTGGAAGATTTTTCAGAAATG
GAACAAAGTGGTTATTATGCCTGCCTCTCCAAAGAGACCCCCACA
GAAGAGGCGAGCCATTATCTCTACCTGAAGGCAAGAGTGTGTGAG
AACTGCGTGGAGGTGGAT
Amino acids
(SEQ ID NO: 7)
QDGNEEIGDTTQNPYKVSISGTTVTLTCPRYDGQEIKWLVNDQNK
EGHEDHLLLEDFSEMEQSGYYACLSKETPTEEASHYLYLKARVCE
NCVEVD

2. Generation of Cross-Species Specific Single Chain Antibody Fragments (scFv) Binding to the N-Terminal Amino Acids 1-27 of CD3Epsilon of Man and Different Non-Chimpanzee Primates
2.1. Immunization of Mice Using the N-Terminus of CD3Epsilon Separated from its Native CD3-Context by Fusion to a Heterologous Soluble Protein

[0648] Ten weeks old F1 mice from balb/c× C57black crossings were immunized with the CD3epsilon-Fc fusion protein carrying themost N-terminal amino acids 1-27 of the mature CD3epsilon chain (1-27 CD3-Fc) of man and/or Saimiris ciureus. To this end 40 μg of the 1-27 CD3-Fc fusion protein with 10 nmol of a thioate-modified CpGOligonucleotide (5′-tccatgacgttcctgatgct-3′) (SEQ ID No. 343) in 300 μl PBS were injected per mouse intra-peritoneally. Mice receive booster immunizations after 21, 42 and optionally 63 days in the same way. Ten days after the first booster immunization, blood samples were taken and antibody serum titer against 1-27 CD3-Fc fusion protein iwa tested by ELISA. Additionally, the titer against the CD3-positive human T cell line HPBall was tested in flow cytometry according to standard protocols. Serum titers were significantly higher in immunized than in non-immunized animals.

2.2. Generation of an Immune Murine Antibody scFv Library: Construction of a Combinatorial Antibody Library and Phage Display

[0649] Three days after the last injection the murine spleen cells were harvested for the preparation of total RNA according to standard protocols.

[0650] A library of murine immunoglobuline (Ig) light chain (kappa) variable region (VK) and Ig heavy chain variable region (VH) DNA-fragments was constructed by RT-PCR on murine spleen RNA using VK-and VH specific primer. cDNA was synthesized according to standard protocols.

[0651] The primers were designed in a way to give rise to a 5′-Xhol and a 3′-BstEII recognition site for the amplified heavy chain V-fragments and to a 5′-Sacl and a 3′-Spel recognition site for amplified VK DNA fragments.

[0652] For the PCR-amplification of the VH DNA-fragments eight different 5′-VH-family specific primers (MVH1(GC)AG GTG CAG CTC GAG GAG TCA GGA CCT (SEQ ID No. 344); MVH2 GAG GTC CAG CTC GAG CAG TCT GGA CCT (SEQ ID No. 345); MVH3 CAG GTC CAA CTC GAG CAG CCT GGG GCT (SEQ ID No. 346); MVH4 GAG GTT CAG CTC GAG CAG TCT GGG GCA (SEQ ID No. 347); MVH5 GA(AG) GTG AAG CTC GAG GAG TCT GGA GGA (SEQ ID No. 348); MVH6 GAG GTG AAG CTT CTC GAG TCT GGA GGT (SEQ ID No. 349); MVH7 GAA GTG AAG CTC GAG GAG TCT GGG GGA (SEQ ID No. 350); MVH8 GAG GTT CAG CTC GAG CAG TCT GGA GCT (SEQ ID No. 351)) were each combined with one 3′-VH primer (3′MuVHBstEII tga gga gac ggt gac cgt ggt ccc ttg gcc cca g (SEQ ID No. 352)); for the PCR amplification of the VK-chain fragments seven different 5′-VKfamily specific primers (MUVK1 CCA GTT CCG AGC TCG TTG TGA CTC AGG AAT CT (SEQ ID No. 353); MUVK2 CCA GTT CCG AGC TCG TGT TGA CGC AGC CGC CC (SEQ ID No. 354); MUVK3 CCA GTT CCG AGC TCG TGC TCA CCC AGT CTC CA (SEQ ID No. 355); MUVK4 CCA GTT CCG AGC TCC AGA TGA CCC AGT CTC CA (SEQ ID No. 356); MUVK5 CCA GAT GTG AGC TCG TGA TGA CCC AGA CTC CA (SEQ ID No. 357); MUVK6 CCA GAT GTG AGC TCG TCA TGA CCC AGT CTC CA (SEQ ID No. 358); MUVK7 CCA GTT CCG AGC TCG TGA TGA CAC AGT CTC CA (SEQ ID No. 359)) were each combined with one 3′-VK primer (3′MuVkHindIII/BsiW1 tgg tgc act agt cgt acg ttt gat ctc aag ctt ggt ccc (SEQ ID No. 360)).

[0653] The following PCR program was used for amplification: denaturation at 94° C. for 20 sec; primer annealing at 52° C. for 50 sec and primer extension at 72° C. for 60 sec and 40 cycles, followed by a 10 min final extension at 72° C.

[0654] 450 ng of the kappa light chain fragments (Sacl-Spel digested) were ligated with 1400 ng of the phagemid pComb3H5Bhis (Sacl-Spel digested; large fragment). The resulting combinatorial antibody library was then transformed into 300 μl of electrocompetent Escherichia coli XL1 Blue cells by electroporation (2.5 kV, 0.2 cm gap cuvette, 25 uFD, 200 Ohm, Biorad gene-pulser) resulting in a library size of more than 10⁷ independent clones. After one hour of phenotype expression, positive transformants were selected for carbenicilline resistance encoded by the pComb3H5BHis vector in 100 ml of liquid super broth (SB)-culture over night. Cells were then harvested by centrifugation and plasmid preparation was carried out using a commercially available plasmid preparation kit (Qiagen).

[0655] 2800 ng of this plasmid-DNA containing the VK-library (Xhol-BstEII digested; large fragment) were ligated with 900 ng of the heavy chain V-fragments (Xhol-BstEII digested) and again transformed into two 300 μl aliquots of electrocompetent E. coli XL1 Blue cells by electroporation (2.5 kV, 0.2 cm gap cuvette, 25 uFD, 200 Ohm) resulting in a total VH-VK scFv (single chain variable fragment) library size of more than 10⁷ independent clones.

[0656] After phenotype expression and slow adaptation to carbenicillin, the E. coli cells containing the antibody library were transferred into SB-Carbenicillin (50 ug/mL) selection medium. The E. coli cells containing the antibody library wass then infected with an infectious dose of 10¹² particles of helper phage VCSM13 resulting in the production and secretion of filamentous M13 phage, wherein phage particle contains single stranded pComb3H5BHis-DNA encoding a murine scFv-fragment and displayed the corresponding scFv-protein as a translational fusion to phage coat protein Ill. This pool of phages displaying the antibody library was later used for the selection of antigen binding entities.

### 2.3. Phage Display Based Selection of CD3-Specific Binders

[0657] The phage library carrying the cloned scFv-repertoire was harvested from the respective culture supernatant by PEG8000/NaCl precipitation and centrifugation. Approximately 10¹¹ to 10¹² scFv phage particles were resuspended in 0.4 ml of PBS/0.1% BSA and incubated with 10⁵ to 10⁷ Jurkat cells (a CD3-positive human T-cell line) for 1 hour on ice under slow agitation. These Jurkat cells were grown beforehand in RPMI medium enriched with fetal calf serum (10%), glutamine and penicillin/streptomycin, harvested by centrifugation, washed in PBS and resuspended in PBS/1% FCS (containing Na Azide). scFv phage which do not specifically bind to the Jurkat cells were eliminated by up to five washing steps with PBS/1% FCS (containing Na Azide). After washing, binding entities were eluted from the cells by resuspending the cells in HCl-glycine pH 2.2 (10 min incubation with subsequent vortexing) and after neutralization with 2 M Tris pH 12, the eluate was used for infection of a fresh uninfected E. coli XL1 Blue culture (OD600>0.5). The E. coli culture containing E. coli cells successfully transduced with a phagemid copy, encoding a human scFv-fragment, were again selected for carbenicillin resistance and subsequently infected with VCMS 13 helper phage to start the second round of antibody display and in vitro selection. A total of 4 to 5 rounds of selections were carried out, normally.

### 2.4. Screening for CD3-Specific Binders

[0658] Plasmid DNA corresponding to 4 and 5 rounds of panning was isolated from E. coli cultures after selection. For the production of soluble scFv-protein, VH-VL-DNA fragments were excised from the plasmids (Xhol-Spel). These fragments were cloned via the same restriction sites in the plasmid pComb3H5BFlag/His differing from the original pComb3H5BHis in that the expression construct (e.g. scFv) includes a Flag-tag (TGD YKDDDDK) between the scFv and the His6-tag and the additional phage proteins were deleted. After ligation, each pool (different rounds of panning) of plasmid DNA was transformed into 100 μl heat shock competent E. coli TG1 or XLI blue and plated onto carbenicillin LB-agar. Single colonies were picked into 100 μl of LB carb (50 ug/ml).

[0659] E. coli transformed with pComb3H5BHis containing a VL-and VH-segment produce soluble scFv in sufficient amounts after excision of the gene III fragment and induction with 1 mM IPTG. Due to a suitable signal sequence, the scFv-chain was exported into the periplasma where it folds into a functional conformation.

[0660] Single E. coli TG1 bacterial colonies from the transformation plates were picked for periplasmic small scale preparations and grown in SB-medium (e.g. 10 ml) supplemented with 20 mM MgCl2 and carbenicillin 50 μg/ml (and re-dissolved in PBS (e.g. 1 ml) after harvesting. By four rounds of freezing at −70° C. and thawing at 37° C., the outer membrane of the bacteria was destroyed by temperature shock and the soluble periplasmic proteins including the scFvs were released into the supernatant. After elimination of intact cells and cell-debris by centrifugation, the supernatant containing the human anti-human CD3-scFvs was collected and used for further examination.

### 2.5. Identification of CD3-Specific Binders

[0661] Binding of the isolated scFvs was tested by flow cytometry on eukaryotic cells, which on their surface express a heterologous protein displaying at its N-terminus the first 27 N-terminal amino acids of CD3epsilon.

[0662] As described in Example 4, the first amino acids 1-27 of the N-terminal sequence of the mature CD3 epsilon chain of the human T cell receptor complex (amino acid sequence: QDGNEEMGGITQTPYKVSISGTTVILT SEQ ID NO: 2) were fused to the N-terminus of the transmembrane protein EpCAM so that the N-terminus was located at the outer cell surface. Additionally, a FLAG epitope was inserted between the N-terminal 1-27 CD3epsilon sequence and the EpCAM sequence. This fusion product was expressed in human embryonic kidney (HEK) and chinese hamster ovary (CHO) cells.

[0663] Eukaryotic cells displaying the 27 most N-terminal amino acids of mature CD3epsilon of other primate species were prepared in the same way for Saimiri sciureus (Squirrel monkey) (CD3epsilon N-terminal amino acid sequence: QDGNEEIGDTTQNPYKVSISGTTVTLT SEQ ID NO: 8), for Callithrix jacchus (CD3epsilon N-terminal amino acid sequence: QDGNEEMGDTTQNPYKVSISGTTVTLT SEQ ID NO: 4) and for Saguinus oedipus (CD3epsilon N-terminal amino acid sequence: QDGNEEMGDTTQNPYKVSISGTTVTLT SEQ ID NO: 6).

[0664] For flow cytometry 2,5×10⁵ cells are incubated with 50 μl supernatant or with 5 μg/ml of the purified constructs in 50 μl PBS with 2% FCS. The binding of the constructs was detected with an anti-His antibody (Penta-His Antibody, BSA free, Qiagen GmbH, Hilden, FRG) at 2 μg/ml in 50 μl PBS with 2% FCS. As a second step reagent a R-Phycoerythrin-conjugated affinity purified F(ab′)2 fragment, goat anti-mouse IgG (Fc-gamma fragment specific), diluted 1:100 in 50 μl PBS with 2% FCS (Dianova, Hamburg, FRG) was used. The samples were measured on a FACSscan (BD biosciences, Heidelberg, FRG).

[0665] Binding was always confirmed by flowcytometry as described in the foregoing paragraph on primary T cells of man and different primates (e.g. Saimiris ciureus, Callithrix jacchus, Saguinus oedipus).

2.6. Generation of Human/Humanized Equivalents of Non-Human CD3Epsilon Specific scFvs

[0666] The VH region of the murine anti-CD3 scFv was aligned against human antibody germline amino acid sequences. The human antibody germline VH sequence was chosen which has the closest homology to the non-human VH and a direct alignment of the two amino acid sequences was performed. There were a number of framework residues of the non-human VH that differ from the human VH framework regions (“different framework positions”). Some of these residues may contribute to the binding and activity of the antibody to its target.

[0667] To construct a library that contain the murine CDRs and at every framework position that differs from the chosen human VH sequence both possibilities (the human and the maternal murine amino acid residue), degenerated oligonucleotides were synthesized. These oligonucleotides incorporate at the differing positions the human residue with a probability of 75% and the murine residue with a probability of 25%. For one human VH e.g. six of these oligonucleotides had to be synthesized that overlap in a terminal stretch of approximately 20 nucleotides. To this end every second primer was an antisense primer. Restriction sites needed for later cloning within the oligonucleotides were deleted.

[0668] These primers may have a length of 60 to 90 nucleotides, depending on the number of primers that were needed to span over the whole V sequence.

[0669] These e.g. six primers were mixed in equal amounts (e.g. 1 μl of each primer (primer stocks 20 to 100 μM) to a 20 μl PCR reaction) and added to a PCR mix consisting of PCR buffer, nucleotides and Taq polymerase. This mix was incubated at 94° C. for 3 minutes, 65° C. for 1 minute, 62° C. for 1 minute, 59° C. for 1 minute, 56° C. for 1 minute, 52° C. for 1 minute, 50° C. for 1 minute and at 72° C. for 10 minutes in a PCR cycler. Subsequently the product was run in an agarose gel electrophoresis and the product of a size from 200 to 400 isolated from the gel according to standard methods.

[0670] This PCR product was then used as a template for a standard PCR reaction using primers that incorporate N-terminal and C-terminal suitable cloning restriction sites. The DNA fragment of the correct size (for a VH approximately 350 nucleotides) was isolated by agarose gel electrophoresis according to standard methods. In this way sufficient VH DNA fragment was amplified. This VH fragment was now a pool of VH fragments that have each one a different amount of human and murine residues at the respective differing framework positions (pool of humanized VH). The same procedure was performed for the VL region of the murine anti-CD3 scFv (pool of humanized VL).

[0671] The pool of humanized VH was then combined with the pool of humanized VL in the phage display vector pComb3H5Bhis to form a library of functional scFvs from which—after display on filamentous phage-anti-CD3 binders were selected, screened, identified and confirmed as described above for the parental non-human (murine) anti-CD3 scFv. Single clones were then analyzed for favorable properties and amino acid sequence. Those scFvs which were closest in amino acid sequence homology to human germline V-segments are preferred particularly those wherein at least one CDR among CDR I and II of VH and CDR I and II of VLkappa or CDR I and II of VLlambda shows more than 80% amino acid sequence identity to the closest respective CDR of all human germline V-segments. Anti-CD3 scFvs were converted into recombinant bispecific single chain antibodies as described in the following Examples 9, 16, and 24.

### 3. Generation of a Recombinant Fusion Protein of the N-Terminal Amino Acids 1-27 of the Human CD3 Epsilon Chain Fused to the Fc-Part of an IgG1 (1-27 CD3-Fc).

### 3.1. Cloning and Expression of 1-27 CD3-Fc

[0672] The coding sequence of the 1-27 N-terminal amino acids of the human CD3 epsilon chain fused to the hinge and Fc gamma region of human immunoglobulin IgG1 as well as an 6 Histidine Tag were obtained by gene synthesis according to standard protocols (cDNA sequence and amino acid sequence of the recombinant fusion protein are listed under SEQ ID NOs 230 and 229). The gene synthesis fragment was designed as to contain first a Kozak site for eukaryotic expression of the construct, followed by an 19 amino acid immunoglobulin leader peptide, followed in frame by the coding sequence of the first 27 amino acids of the extracellular portion of the mature human CD3 epsilon chain, followed in frame by the coding sequence of the hinge region and Fc gamma portion of human IgG1, followed in frame by the coding sequence of a 6 Histidine tag and a stop codon (FIG. 1). The gene synthesis fragment was also designed as to introduce restriction sites at the beginning and at the end of the cDNA coding for the fusion protein. The introduced restriction sites, EcoRI at the 5′ end and SaII at the 3′ end, are utilized in the following cloning procedures. The gene synthesis fragment was cloned via EcoRI and SaII into a plasmid designated pEF-DHFR (pEF-DHFR is described in Mack et al. Proc. Natl. Acad. Sci. USA 92 (1995) 7021-7025 and Raum et al. Cancer Immunol Immunother 50 (2001) 141-150) following standard protocols. A sequence verified plasmid was used for transfection in the FreeStyle 293 Expression System (Invitrogen GmbH, Karlsruhe, Germany) according to the manufacturers protocol. After 3 days cell culture supernatants of the transfectants were harvested and tested for the presence of the recombinant construct in an ELISA assay. Goat anti-human IgG, Fc-gamma fragment specific antibody (obtained from Jackson ImmunoResearch Europe Ltd., Newmarket, Suffolk, UK) was diluted in PBS to 5 μg/ml and coated with 100 μl per well onto a MaxiSorp 96-well ELISA plate (Nunc GmbH & Co. KG, Wiesbaden, Germany) over night at 4° C. Wells were washed with PBS with 0.05% Tween 20 (PBS/Tween and blocked with 3% BSA in PBS (bovine Albumin, fraction V, Sigma-Aldrich Chemie GmbH, Taufkirchen, Germany) for 60 minutes at room temperature (RT). Subsequently, wells were washed again PBS/Tween and then incubated with cell culture supernatants for 60 minutes at RT. After washing wells were incubated with a peroxidase conjugated anti-His6 antibody (Roche Diagnostics GmbH, Roche Applied Science, Mannheim, Germany) diluted 1:500 in PBS with 1% BSA for 60 minutes at RT. Subsequently, wells were washed with 200 μl PBS/Tween and 100 μl of the SIGMAFAST OPD (SIGMAFAST OPD [o-Phenylenediamine dihydrochloride] substrate solution (Sigma-Aldrich Chemie GmbH, Taufkirchen, Germany) was added according to the manufacturers protocol. The reaction was stopped by adding 100 μl 1 M H₂SO₄. Color reaction was measured on a PowerWaveX microplate spectrophotometer (BioTek Instruments, Inc., Winooski, Vermont, USA) at 490 nm and subtraction of background absorption at 620 nm. As shown in FIG. 2 presence of the construct as compared to irrelevant supernatant of mock-transfected HEK 293 cells used as negative control was clearly detectable.

### 3.2. Binding Assay of Cross-Species Specific Single Chain Antibodies to 1-27 CD3-Fc.

[0673] Binding of crude preparations of periplasmatically expressed cross-species specific single chain antibodies specific for CD3 epsilon to 1-27 CD3-Fc was tested in an ELISA assay. Goat anti-human IgG, Fc-gamma fragment specific antibody (Jackson ImmunoResearch Europe Ltd., Newmarket, Suffolk, UK) was diluted in PBS to 5 μg/ml and coated with 100 μl per well onto a MaxiSorp 96-well ELISA plate (Nunc GmbH & Co. KG, Wiesbaden, Germany) over night at 4° C. Wells were washed with PBS with 0.05% Tween 20 (PBS/Tween and blocked with PBS with 3% BSA (bovine Albumin, fraction V, Sigma-Aldrich Chemie GmbH, Taufkirchen, Germany) for 60 minutes at RT. Subsequently, wells were washed with PBS/Tween and incubated with supernatants of cells expressing the 1-27 CD3-Fc construct for 60 minutes at RT. Wells were washed with PBS/Tween and incubated with crude preparations of periplasmatically expressed cross-species specific single-chain antibodies as described above for 60 minutes at room temperature. After washing with PBS/Tween wells were incubated with peroxidase conjugated anti-Flag M2 antibody (Sigma-Aldrich Chemie GmbH, Taufkirchen, Germany) diluted 1:10000 in PBS with 1% BSA for 60 minutes at RT. Wells were washed with PBS/Tween and incubated with 100 μl of the SIGMAFAST OPD (OPD [o-Phenylenediamine dihydrochloride] substrate solution (Sigma-Aldrich Chemie GmbH, Taufkirchen, Germany) according to the manufacturers protocol. Color reaction was stopped with 100 μl 1 M H2SO4 and measured on a PowerWaveX microplate spectrophotometer (BioTek Instruments, Inc., Winooski, Vermont, USA) at 490 nm and subtraction of background absorption at 620 nm. Strong binding of cross-species specific human single chain antibodies specific for CD3 epsilon to the 1-27 CD3-Fc construct compared to a murine anti CD3 single-chain antibody was observed (FIG. 3).

4. Generation of Recombinant Transmembrane Fusion Proteins of the N-Terminal Amino Acids 1-27 of CD3 Epsilon from Different Non-Chimpanzee Primates Fused to EpCAM from Cynomolgus Monkey (1-27 CD3-EpCAM).

### 4.1. Cloning and Expression of 1-27 CD3-EpCAM

[0674] CD3 epsilon was isolated from different non-chimpanzee primates (marmoset, tamarin, squirrel monkey) and swine. The coding sequences of the 1-27 N-terminal amino acids of CD3 epsilon chain of the mature human, common marmoset (Callithrix jacchus), cottontop tamarin (Saguinus oedipus), common squirrel monkey (Saimiri sciureus) and domestic swine (Sus scrofa; used as negative control) fused to the N-terminus of Flag tagged cynomolgus EpCAM were obtained by gene synthesis according to standard protocols. cDNA sequence and amino acid sequence of the recombinant fusion proteins are listed under SEQ ID NOs 231 to 240). The gene synthesis fragments were designed as to contain first a BsrGI site to allow fusion in correct reading frame with the coding sequence of a 19 amino acid immunoglobulin leader peptide already present in the target expression vector, which is followed in frame by the coding sequence of the N-terminal 1-27 amino acids of the extracellular portion of the mature CD3 epsilon chains, which is followed in frame by the coding sequence of a Flag tag and followed in frame by the coding sequence of the mature cynomolgus EpCAM transmembrane protein (FIG. 4). The gene synthesis fragments were also designed to introduce a restriction site at the end of the cDNA coding for the fusion protein. The introduced restriction sites BsrGI at the 5′ end and SaII at the 3′ end, were utilized in the following cloning procedures. The gene synthesis fragments were then cloned via BsrGI and SaII into a derivative of the plasmid designated pEF DHFR (pEF-DHFR is described in Mack et al. Proc. Natl. Acad. Sci. USA 92 (1995) 7021-7025), which already contained the coding sequence of the 19 amino acid immunoglobulin leader peptide following standard protocols. Sequence verified plasmids were used to transiently transfect 293-HEK cells using the MATra-A Reagent (IBA GmbH, Gottingen, Germany) and 12 μg of plasmid DNA for adherent 293-HEK cells in 175 ml cell culture flasks according to the manufacturers protocol. After 3 days of cell culture the transfectants were tested for cell surface expression of the recombinant transmembrane protein via an FACS assay according to standard protocols. For that purpose a number of 2,5×10⁵ cells were incubated with the anti-Flag M2 antibody (Sigma-Aldrich Chemie GmbH, Taufkirchen, Germany) at 5 μg/ml in PBS with 2% FCS. Bound antibody was detected with an R-Phycoerythrin-conjugated affinity purified F(ab′)2 fragment, goat anti-mouse IgG, Fc-gamma fragment specific 1:100 in PBS with 2% FCS (Jackson ImmunoResearch Europe Ltd., Newmarket, Suffolk, UK). The samples were measured on a FACScalibur (BD biosciences, Heidelberg, Germany). Expression of the Flag tagged recombinant transmembrane fusion proteins consisting of cynomolgus EpCAM and the 1-27 N-terminal amino acids of the human, marmoset, tamarin, squirrel monkey and swine CD3 epsilon chain respectively on transfected cells was clearly detectable (FIG. 5).

### 4.2. Binding of Cross-Species Specific Anti-CD3 Single Chain Antibodies to the 1-27 CD3-EpCAM

[0675] Binding of crude preparations of periplasmatically expressed cross-species specific anti CD3 single-chain antibodies to the 1-27 N-terminal amino acids of the human, marmoset, tamarin and squirrel monkey CD3 epsilon chains respectively fused to cynomolgus Ep-CAM was tested in an FACS assay according to standard protocols. For that purpose a number of 2,5×10⁵ cells were incubated with crude preparations of periplasmatically expressed cross-species specific anti CD3 single-chain antibodies (preparation was performed as described above and according to standard protocols) and a single-chain murine anti-human CD3 antibody as negative control. As secondary antibody the Penta-His antibody (Qiagen GmbH, Hildesheim, Germany) was used at 5 μg/ml in 50 μl PBS with 2% FCS. The binding of the antibody was detected with an R-Phycoerythrin-conjugated affinity purified F(ab′)2 fragment, goat anti-mouse IgG, Fc-gamma fragment specific, diluted 1:100 in PBS with 2% FCS (Jackson ImmunoResearch Europe Ltd., Newmarket, Suffolk, UK). The samples were measured on a FACScalibur (BD biosciences, Heidelberg, Germany). As shown in FIG. 6(A to E) binding of single chain antibodies to the transfectants expressing the recombinant transmembrane fusion proteins consisting of the 1-27 N-terminal amino acids of CD3 epsilon of the human, marmoset, tamarin or squirrel monkey fused to cynomolgus EpCAM was observed. No binding of cross-species specific single chain antibodies was observed to a fusion protein consisting of the 1-27 N-terminal CD3 epsilon of swine fused to cynomolgus EpCAM used as negative control. Multi-primate cross-species specificity of the anti-CD3 single chain antibodies was shown. Signals obtained with the anti Flag M2 antibody and the cross-species specific single chain antibodies were comparable, indicating a strong binding activity of the cross-species specific single chain antibodies to the N-terminal amino acids 1-27 of CD3 epsilon.

5. Binding Analysis of Cross-Species Specific Anti-CD3 Single Chain Antibodies by Alanine-Scanning of Mouse Cells Transfected with the Human CD3 Epsilon Chain and its Alanine Mutants

### 5.1. Cloning and Expression of Human Wild-Type CD3 Epsilon

[0676] The coding sequence of the human CD3 epsilon chain was obtained by gene synthesis according to standard protocols (cDNA sequence and amino acid sequence of the human CD3 epsilon chain are listed under SEQ ID NOs 242 and 241). The gene synthesis fragment was designed as to contain a Kozak site for eukaryotic expression of the construct and restriction sites at the beginning and the end of the cDNA coding for human CD3 epsilon. The introduced restriction sites EcoRI at the 5′ end and SaII at the 3′ end, were utilized in the following cloning procedures. The gene synthesis fragment was then cloned via EcoRI and SaII into a plasmid designated pEF NEO following standard protocols. pEF NEO was derived of pEF DHFR (Mack et al. Proc. Natl. Acad. Sci. USA 92 (1995) 7021-7025) by replacing the cDNA of the DHFR with the cDNA of the neomycin resistance by conventional molecular cloning. A sequence verified plasmid was used to transfect the murine T cell line EL4 (ATCC No. TIB-39) cultivated in RPMI with stabilized L-glutamine supplemented with 10% FCS, 1% penicillin/streptomycin, 1% HEPES, 1% pyruvate, 1% non-essential amino acids (all Biochrom AG Berlin, Germany) at 37° C., 95% humidity and 7% CO₂. Transfection was performed with the SuperFect Transfection Reagent (Qiagen GmbH, Hilden, Germany) and 2 μg of plasmid DNA according to the manufacturer's protocol. After 24 hours the cells were washed with PBS and cultivated again in the aforementioned cell culture medium with600 μg/ml G418 for selection (PAA Laboratories GmbH, Pasching, Austria). 16 to 20 days after transfection the outgrowth of resistant cells was observed. After additional 7 to 14 days cells were tested for expression of human CD3 epsilon by FACS analysis according to standard protocols. 2,5×10⁵ cells were incubated with anti-human CD3 antibody UCHT-1 (BD biosciences, Heidelberg, Germany) at 5 μg/ml in PBS with 2% FCS. The binding of the antibody was detected with an R-Phycoerythrin-conjugated affinity purified F(ab′)2 fragment, goat anti-mouse IgG, Fc-gamma fragment specific, diluted 1:100 in PBS with 2% FCS (Jackson ImmunoResearch Europe Ltd., Newmarket, Suffolk, UK). The samples were measured on a FACSCalibur (BD biosciences, Heidelberg, Germany). Expression of human wild-type CD3 on transfected EL4 cells is shown in FIG. 7.

### 5.2. Cloning and Expression of the Cross-Species Specific Anti-CD3 Single Chain Antibodies as IgG1 Antibodies

[0677] In order to provide improved means of detection of binding of the cross-species specific single chain anti-CD3 antibodies H2C HLP, A2J HLP and E2M HLP were converted into IgG1 antibodies with murine IgG1 and human lambda constant regions. cDNA sequences coding for the heavy and light chains of respective IgG antibodies were obtained by gene synthesis according to standard protocols. The gene synthesis fragments for each specificity were designed as to contain first a Kozak site to allow eukaryotic expression of the construct, which is followed by an 19 amino acid immunoglobulin leader peptide (SEQ ID NOs 244 and 243), which is followed in frame by the coding sequence of the respective heavy chain variable region or respective light chain variable region, followed in frame by the coding sequence of the heavy chain constant region of murine IgG1 (SEQ ID NOs 246 and 245) or the coding sequence of the human lambda light chain constant region (SEQ ID NO 248 and 247), respectively. Restriction sites were introduced at the beginning and the end of the cDNA coding for the fusion protein. Restriction sites EcoRI at the 5′ end and SaII at the 3′ end were used for the following cloning procedures. The gene synthesis fragments were cloned via EcoRI and SaII into a plasmid designated pEF DHFR (Mack et al. Proc. Natl. Acad. Sci. USA 92 (1995) 7021-7025) for the heavy chain constructs and pEF ADA (pEF ADA is described in Raum et al., Cancer Immunol Immunother., 50(3), (2001), 141-50) for the light chain constructs) according to standard protocols. Sequence verified plasmids were used for co-transfection of respective light and heavy chain constructs in the FreeStyle 293 Expression System (Invitrogen GmbH, Karlsruhe, Germany) according to the manufacturers protocol. After 3 days cell culture supernatants of the transfectants were harvested and used for the alanine-scanning experiment.

### 5.3. Cloning and Expression of Alanine Mutants of Human CD3 Epsilon for Alanine-Scanning

[0678] 27 cDNA fragments coding for the human CD3 epsilon chain with an exchange of one codon of the wild-type sequence of human CD3 epsilon into a codon coding for alanine (GCC) for each amino acid of amino acids 1-27 of the extracellular domain of the mature human CD3 epsilon chain respectively were obtained by gene synthesis. Except for the exchanged codon the cDNA fragments were identical to the aforementioned human wild-type CD3 cDNA fragment. Only one codon was replaced in each construct compared to the human wild-type CD3 cDNA fragment described above. Restriction sites EcoRI and SaII were introduced into the cDNA fragments at identical positions compared to the wild-type construct. All alanine-scanning constructs were cloned into pEF NEO and sequence verified plasmids were transfected into EL4 cells. Transfection and selection of transfectants was performed as described above. As result a panel of expressed constructs was obtained wherein the first amino acid of the human CD3 epsilon chain, glutamine (Q, GIn) at position 1 was replaced by alanine. The last amino acid replaced by alanine was the threonine (T, Thr) at position 27 of mature human wild-type CD3 epsilon. For each amino acid between glutamine 1 and threonine 27 respective transfectants with an exchange of the wild-type amino acid into alanine were generated.

### 5.4. Alanine-Scanning Experiment

[0679] Chimeric IgG antibodies as described in 5.2 and cross-species specific single chain antibodies specific for CD3 epsilon were tested in alanine-scanning experiment. Binding of the antibodies to the EL4 cell lines transfected with the alanine-mutant constructs of human CD3 epsilon as described in 5.3 was tested by FACS assay according to standard protocols. 2,5×10⁵ cells of the respective transfectants were incubated with 50 μl of cell culture supernatant containing the chimeric IgG antibodies or with 50 μl of crude preparations of periplasmatically expressed single-chain antibodies. For samples incubated with crude preparations of periplasmatically expressed single-chain antibodies the anti-Flag M2 antibody (Sigma-Aldrich Chemie GmbH, Taufkirchen, Germany) was used as secondary antibody at 5 μg/ml in 50 μl PBS with 2% FCS. For samples incubated with the chimeric IgG antibodies a secondary antibody was not necessary. For all samples the binding of the antibody molecules was detected with an R-Phycoerythrin-conjugated affinity purified F(ab′)2 fragment, goat anti-mouse IgG, Fc-gamma fragment specific, diluted 1:100 in PBS with 2% FCS (Jackson ImmunoResearch Europe Ltd., Newmarket, Suffolk, UK). Samples were measured on a FACSCalibur (BD biosciences, Heidelberg, Germany). Differential binding of chimeric IgG molecules or cross-species specific single-chain antibodies to the EL4 cell lines transfected with the alanine-mutants of human CD3 epsilon was detected. As negative control either an isotype control or a crude preparation of a periplasmatically expressed single-chain antibody of irrelevant specificity was used respectively. UCHT-1 antibody was used as positive control for the expression level of the alanine-mutants of human CD3 epsilon. The EL4 cell lines transfected with the alanine-mutants for the amino acids tyrosine at position 15, valine at position 17, isoleucine at position 19, valine at position 24 or leucine at position 26 of the mature CD3 epsilon chain were not evaluated due to very low expression levels (data not shown). Binding of the cross-species specific single chain antibodies and the single chain antibodies in chimeric IgG format to the EL4 cell lines transfected with the alanine-mutants of human CD3 epsilon is shown in FIG. 8(A-D) as relative binding in arbitrary units with the geometric mean fluorescence values of the respective negative controls subtracted from all respective geometric mean fluorescence sample values. To compensate for different expression levels all sample values for a certain transfectant were then divided through the geometric mean fluorescence value of the UCHT-1 antibody for the respective transfectant. For comparison with the wild-type sample value of a specificity all sample values of the respective specificity were finally divided through the wild-type sample value, thereby setting the wild-type sample value to 1 arbitrary unit of binding.

[0680] The calculations used are shown in detail in the following formula:

$$value\_Sample ( x , y ) = \frac{Sample ( x , y ) - neg\_Contr . ( x )}{( UCHT - 1 ( x ) - neg\_Contr . ( x ) ) * \frac{WT ( y ) - neg\_Contr . ( wt )}{UCHT - 1 ( wt ) - neg\_Contr . ( wt )}}$$

[0681] In this equation value_Sample means the value in arbitrary units of binding depicting the degree of binding of a specific anti-CD3 antibody to a specific alanine-mutant as shown in FIG. 8(A-D), Sample means the geometric mean fluorescence value obtained for a specific anti-CD3 antibody assayed on a specific alanine-scanning transfectant, neg_Contr. means the geometric mean fluorescence value obtained for the negative control assayed on a specific alanine-mutant, UCHT-1 means the geometric mean fluorescence value obtained for the UCHT-1 antibody assayed on a specific alanine-mutant, WT means the geometric mean fluorescence value obtained for a specific anti-CD3 antibody assayed on the wild-type transfectant, x specifies the respective transfectant, y specifies the respective anti-CD3 antibody and wt specifies that the respective transfectant is the wild-type.

[0682] As can be seen in FIG. 8(A-D) the IgG antibody A2J HLP showed a pronounced loss of binding for the amino acids asparagine at position 4, threonine at position 23 and isoleucine at position 25 of the mature CD3 epsilon chain. A complete loss of binding of IgG antibody A2J HLP was observed for the amino acids glutamine at position 1, aspartate at position 2, glycine at position 3 and glutamate at position 5 of the mature CD3 epsilon chain. IgG antibody E2M HLP showed a pronounced loss of binding for the amino acids asparagine at position 4, threonine at position 23 and isoleucine at position 25 of the mature CD3 epsilon chain. IgG antibody E2M HLP showed a complete loss of binding for the amino acids glutamine at position 1, aspartate at position 2, glycine at position 3 and glutamate at position 5 of the mature CD3 epsilon chain. IgG antibody H2C HLP showed an intermediate loss of binding for the amino acid asparagine at position 4 of the mature CD3 epsilon chain and it showed a complete loss of binding for the amino acids glutamine at position 1, aspartate at position 2, glycine at position 3 and glutamate at position 5 of the mature CD3 epsilon chain. Single chain antibody F12Q HLP showed an essentially complete loss of binding for the amino acids glutamine at position 1, aspartate at position 2, glycine at position 3 of the mature CD3 epsilon chain and glutamate at position 5 of the mature CD3 epsilon chain.

6. Binding Analysis of the Cross-Species Specific Anti-CD3 Binding Molecule H2C HLP to the Human CD3 Epsilon Chain with and without N-Terminal His6 Tag Transfected into the Murine T Cell Line EL4
6.1. Cloning and Expression of the Human CD3 Epsilon Chain with N-Terminal Six Histidine Tag (His6 Tag).

[0683] A cDNA fragment coding for the human CD3 epsilon chain with a N-terminal His6 tag was obtained by gene synthesis. The gene synthesis fragment was designed as to contain first a Kozak site for eukaryotic expression of the construct, which is followed in frame by the coding sequence of a 19 amino acid immunoglobulin leader peptide, which is followed in frame by the coding sequence of a His6 tag which is followed in frame by the coding sequence of the mature human CD3 epsilon chain (the cDNA and amino acid sequences of the construct are listed as SEQ ID NOs 256 and 255). The gene synthesis fragment was also designed as to contain restriction sites at the beginning and the end of the cDNA. The introduced restriction sites EcoRI at the 5′ end and SaII at the 3′ end, were used in the following cloning procedures. The gene synthesis fragment was then cloned via EcoRI and SaII into a plasmid designated pEF-NEO (as described above) following standard protocols. A sequence verified plasmid was used to transfect the murine T cell line EL4. Transfection and selection of the transfectants were performed as described above. After 34 days of cell culture the transfectants were used for the assay described below.

6.2. Binding of the Cross-Species Specific Anti-CD3 Binding Molecule H2C HLP to the Human CD3 Epsilon Chain with and without N-Terminal His6 Tag

[0684] A chimeric IgG antibody with the binding specificity H2C HLP specific for CD3 epsilon was tested for binding to human CD3 epsilon with and without N-terminal His6 tag. Binding of the antibody to the EL4 cell lines transfected the His6-human CD3 epsilon and wild-type human CD3 epsilon respectively was tested by an FACS assay according to standard protocols. 2,5×10⁵ cells of the transfectants were incubated with 50 μl of cell culture supernatant containing the chimeric IgG antibody or 50 μl of the respective control antibodies at 5 μg/ml in PBS with 2% FCS. As negative control an appropriate isotype control and as positive control for expression of the constructs the CD3 specific antibody UCHT-1 were used respectively. The binding of the antibodies was detected with a R-Phycoerythrin-conjugated affinity purified F(ab′)2 fragment, goat anti-mouse IgG, Fc-gamma fragment specific, diluted 1:100 in PBS with 2% FCS (Jackson ImmunoResearch Europe Ltd., Newmarket, Suffolk, UK). Samples were measured on a FACSCalibur (BD biosciences, Heidelberg, Germany). Compared to the EL4 cell line transfected with wild-type human CD3 epsilon a clear loss of binding of the chimeric IgG with binding specificity H2C HLP to human-CD3 epsilon with an N-terminal His6 tag was detected. These results showed that a free N-terminus of CD3 epsilon is essential for binding of the cross-species specific antiCD3 binding specificity H2C HLP to the human CD3 epsilon chain (FIG. 9).

### 7. Cloning and Expression of the C-Terminal, Transmembrane and Truncated Extracellular Domains of Human MCSP

[0685] The coding sequence of the C-terminal, transmembrane and truncated extracellular domain of human MCSP (amino acids 1538-2322) was obtained by gene synthesis according to standard protocols (cDNA sequence and amino acid sequence of the recombinant construct for expression of the C-terminal, transmembrane and truncated extracellular domain of human MCSP (designated as human D3) are listed under SEQ ID NOs 250 and 249). The gene synthesis fragment was designed as to contain first a Kozak site to allow eukaryotic expression of the construct followed by the coding sequence of an 19 amino acid immunoglobulin leader peptide followed in frame by a FLAG tag, followed in frame by a sequence containing several restriction sites for cloning purposes and coding for a 9 amino acid artificial linker (SRTRSGSQL), followed in frame by the coding sequence of the C-terminal, transmembrane and truncated extracellular domain of human MCSP and a stop codon. Restriction sites were introduced at the beginning and at the end of the DNA fragment. The restriction sites EcoRI at the 5′ end and SaII at the 3′ end were used in the following cloning procedures. The fragment was digested with EcoRI and SaII and cloned into pEF-DHFR (pEF-DHFR is described in Mack et al. Proc. Natl. Acad. Sci. USA 92 (1995) 7021-7025) following standard protocols. A sequence verified plasmid was used to transfect CHO/dhfr-cells (ATCC No. CRL 9096). Cells were cultivated in RPMI 1640 with stabilized glutamine, supplemented with 10% FCS, 1% penicillin/streptomycin (all obtained from Biochrom AG Berlin, Germany) and nucleosides from a stock solution of cell culture grade reagents (Sigma-Aldrich Chemie GmbH, Taufkirchen, Germany) to a final concentration of 10 μg/ml Adenosine, 10 μg/ml Deoxyadenosine and 10 μg/ml Thymidine, in an incubator at 37° C., 95% humidity and 7% CO₂. Transfection was performed using the PolyFect Transfection Reagent (Qiagen GmbH, Hilden, Germany) and 5 μg of plasmid DNA according to the manufacturer's protocol. After cultivation for 24 hours cells were washed once with PBS and cultivated again in RPMI 1640 with stabilized glutamine and 1% penicillin/streptomycin. Thus the cell culture medium did not contain nucleosides and thereby selection was applied on the transfected cells. Approximately 14 days after transfection the outgrowth of resistant cells was observed. After an additional 7 to 14 days the transfectants were tested for expression of the construct by FACS analysis. 2,5×10⁵ cells were incubated with 50 μl of an anti-Flag-M2 antibody (Sigma-Aldrich Chemie GmbH, Taufkirchen, Germany) diluted to 5 μg/ml in PBS with 2% FCS. The binding of the antibody was detected with a R-Phycoerythrin-conjugated affinity purified F(ab′)2 fragment, goat anti-mouse IgG, Fc-gamma fragment specific diluted 1:100 in PBS with 2% FCS (ImmunoResearch Europe Ltd., Newmarket, Suffolk, UK). The samples were measured on a FACScalibur (BD biosciences, Heidelberg, Germany).

### 8. Cloning and Expression of the C-Terminal, Transmembrane and Truncated Extracellular Domains of Macaque MCSP

[0686] The cDNA sequence of the C-terminal, transmembrane and truncated extracellular domains of macaque MCSP (designated as macaque D3) was obtained by a set of three PCRs on macaque skin cDNA (Cat No. C1534218-Cy-BC; BioCat GmbH, Heidelberg, Germany) using the following reaction conditions: 1 cycle at 94° C.,3 min., 40 cycles with 94° C. for 0.5 min., 52° C. for 0.5 min. and 72° C. for 1.75 min., terminal cycle of 72° C. for 3 min . . . . The following primers were used:

forward primer:
(SEQ ID No. 361)
5′-GATCTGGTCTACACCATCGAGC-3′
reverse primer:
(SEQ ID No. 362)
5′-GGAGCTGCTGCTGGCTCAGTGAGG-3′
forward primer:
(SEQ ID No. 363)
5′-TTCCAGCTGAGCATGTCTGATGG-3′
reverse primer:
(SEQ ID No. 364)
5′-CGATCAGCATCTGGGCCCAGG-3′
forward primer:
(SEQ ID No. 365)
5′-GTGGAGCAGTTCACTCAGCAGGACC-3′
reverse primer:
(SEQ ID NO. 366)
5′-GCCTTCACACCCAGTACTGGCC-3′

[0687] Those PCRs generated three overlapping fragments (A: 1-1329, B: 1229-2428, C: 1782-2547) which were isolated and sequenced according to standard protocols using the PCR primers and thereby provided a 2547 bp portion of the cDNA sequence of macaque MCSP (the cDNA sequence and amino acid sequence of this portion of macaque MCSP are listed under SEQ ID NOs 252 and 251) from 74 bp upstream of the coding sequence of the C-terminal domain to 121 bp downstream of the stop codon. Another PCR using the following reaction conditions: 1 cycle at 94° C. for 3 min, 10 cycles with 94° C. for 1 min, 52° C. for 1 min and 72° C. for 2.5 min, terminal cycle of 72° C. for 3 min was used to fuse the PCR products of the aforementioned reactions A and B. The following primers are used:

forward primer:
(SEQ ID No. 367)
5′-tcccgtacgagatctggatcccaattggatggcgg
actcgtgctgttctcacacagagg-3′
reverse primer:
(SEQ ID No. 368)
5′-agtgggtcgactcacacccagtactggccattctt
aagggcaggg-3′

[0688] The primers for this PCR were designed to introduce restriction sites at the beginning and at the end of the cDNA fragment coding for the C-terminal, transmembrane and truncated extracellular domains of macaque MCSP. The introduced restriction sites Mfel at the 5′ end and SaII at the 3′ end, were used in the following cloning procedures. The PCR fragment was then cloned via Mfel and SaII into a Bluescript plasmid containing the EcoRI/Mfel fragment of the aforementioned plasmid pEF-DHFR (pEF-DHFR is described in Raum et al. Cancer Immunol Immunother 50 (2001) 141-150) by replacing the C-terminal, transmembrane and truncated extracellular domains of human MCSP. The gene synthesis fragment contained the coding sequences of the immunoglobulin leader peptide and the Flag tag as well as the artificial linker (SRTRSGSQL) in frame to the 5′ end of the cDNA fragment coding for the C-terminal, transmembrane and truncated extracellular domains of macaque MCSP. This vector was used to transfect CHO/dhfr-cells (ATCC No. CRL 9096). Cells were cultivated in RPMI 1640 with stabilized glutamine supplemented with 10% FCS, 1% penicillin/streptomycin (all from Biochrom AG Berlin, Germany) and nucleosides from a stock solution of cell culture grade reagents (Sigma-Aldrich Chemie GmbH, Taufkirchen, Germany) to a final concentration of 10 μg/ml Adenosine, 10 μg/ml Deoxyadenosine and 10 μg/ml Thymidine, in an incubator at 37° C., 95% humidity and 7% CO₂. Transfection was performed with PolyFect Transfection Reagent (Qiagen GmbH, Hilden, Germany) and 5 μg of plasmid DNA according to the manufacturer's protocol. After cultivation for 24 hours cells were washed once with PBS and cultivated again in RPMI 1640 with stabilized glutamine and 1% penicillin/streptomycin. Thus the cell culture medium did not contain nucleosides and thereby selection was applied on the transfected cells. Approximately 14 days after transfection the outgrowth of resistant cells is observed. After an additional 7 to 14 days the transfectants were tested for expression of the recombinant construct via FACS. 2,5×10⁵ cells were incubated with 50 μl of an anti-Flag-M2 antibody (Sigma-Aldrich Chemie GmbH, Taufkirchen, Germany) diluted to 5 μg/ml in PBS with 2% FCS. Bound antibody was detected with a R-Phycoerythrin-conjugated affinity purified F(ab′)2 fragment, goat anti-mouse IgG, Fc-gamma fragment specific, diluted 1:100 in PBS with 2% FCS (Jackson ImmunoResearch Europe Ltd., Newmarket, Suffolk, UK). Samples were measured on a FACScalibur (BD biosciences, Heidelberg, Germany).

### 9. Generation and Characterisation of MCSP and CD3 Cross-Species Specific Bispecific Single Chain Molecules

[0689] Bispecific single chain antibody molecules each comprising a binding domain cross-species specific for human and non-chimpanzee primate CD3 epsilon as well as a binding domain cross-species-specific for human and non-chimpanzee primate MCSP, are designed as set out in the following Table 1:

TABLE 1
Formats of MCSP and CD3 cross-species specific
bispecific single chain antibodies

| SEQ ID | Formats of protein constructs |
|---|---|
| (nucl/prot) | (N → C) |
| 190/189 | MCSP-G4 HL × H2C HL |
| 192/191 | MCSP-G4 HL × F12Q HL |
| 194/193 | MCSP-G4 HL × I2C HL |
| 196/195 | MCSP-G4 HLP × F6A HLP |
| 198/197 | MCSP-G4 HLP × H2C HLP |
| 202/201 | MCSP-G4 HLP × G4H HLP |
| 206/205 | MCSP-G4 HLP × E1L HLP |
| 208/207 | MCSP-G4 HLP × E2M HLP |
| 212/211 | MCSP-G4 HLP × F12Q HL |
| 214/213 | MCSP-G4 HLP × I2C HL |
| 216/215 | MCSP-D2 HL × H2C HL |
| 218/217 | MCSP-D2 HL × F12Q HL |
| 220/219 | MCSP-D2 HL × 12C HL |
| 222/221 | MCSP-D2 HLP × H2C HLP |
| 224/223 | MCSP-F9 HL × H2C HL |
| 226/225 | MCSP-F9 HLP × H2C HLP |
| 228/227 | MCSP-F9 HLP × G4H HLP |
| 318/317 | MCSP-A9 HL × H2C HL |
| 320/319 | MCSP-A9 HL × F12Q HL |
| 322/321 | MCSP-A9 HL × I2C HL |
| 324/323 | MCSP-C8 HL × I2C HL |
| 328/327 | MCSP-B7 HL × I2C HL |
| 326/325 | MCSP-B8 HL × I2C HL |
| 330/329 | MCSP-G8 HL × I2C HL |
| 332/331 | MCSP-D5 HL × I2C HL |
| 334/333 | MCSP-F7 HL × I2C HL |
| 336/335 | MCSP-G5 HL × I2C HL |
| 338/337 | MCSP-F8 HL × I2C HL |
| 340/339 | MCSP-G10 HL × I2C HL |

[0690] The aforementioned constructs containing the variable heavy-chain (VH) and variable light-chain (VL) domains cross-species specific for human and macaque MCSP D3 and the VH and VL domains cross-species specific for human and macaque CD3 were obtained by gene synthesis. The gene synthesis fragments were designed as to contain first a Kozak site for eukaryotic expression of the construct, followed by a 19 amino acid immunoglobulin leader peptide, followed in frame by the coding sequence of the respective bispecific single chain antibody molecule, followed in frame by the coding sequence of a histidine₆-tag and a stop codon. The gene synthesis fragment was also designed as to introduce suitable N- and C-terminal restriction sites. The gene synthesis fragment was cloned via these restriction sites into a plasmid designated pEF-DHFR (pEF-DHFR is described in Raum et al. Cancer Immunol Immunother 50 (2001) 141-150) according to standard protocols (Sambrook, Molecular Cloning; A Laboratory Manual, 3rd edition, Cold Spring Harbour Laboratory Press, Cold Spring Harbour, New York (2001)). The constructs were transfected stably or transiently into DHFR-deficient CHO-cells (ATCC No. CRL 9096) by electroporation or alternatively into HEK 293 (human embryonal kidney cells, ATCC Number: CRL-1573) in a transient manner according to standard protocols.

[0691] Eukaryotic protein expression in DHFR deficient CHO cells was performed as described by Kaufmann R. J. (1990) Methods Enzymol. 185, 537-566. Gene amplification of the constructs was induced by addition of increasing concentrations of methothrexate (MTX) up to final concentrations of 20 nM MTX. After two passages of stationary culture the cells were grown in roller bottles with nucleoside-free HyQ PF CHO liquid soy medium (with 4.0 mM L-Glutamine with 0.1% Pluronic F-68; HyClone) for 7 days before harvest. The cells were removed by centrifugation and the supernatant containing the expressed protein is stored at −20° C. Äkta® Explorer System (GE Health Systems) and Unicorn® Software were used for chromatography. Immobilized metal affinity chromatography (“IMAC”) was performed using a Fractogel EMD chelate® (Merck) which was loaded with ZnCl₂ according to the protocol provided by the manufacturer. The column was equilibrated with buffer A (20 mM sodium phosphate buffer pH 7.2, 0.1 M NaCl) and the cell culture supernatant (500 ml) was applied to the column (10 ml) at a flow rate of 3 ml/min. The column was washed with buffer A to remove unbound sample. Bound protein was eluted using a two step gradient of buffer B (20 mM sodium phosphate buffer pH 7.2, 0.1 M NaCl, 0.5 M Imidazole) according to the following:
[0692] Step 1: 20% buffer B in 6 column volumes
[0693] Step 2: 100% buffer B in 6 column volumes

[0694] Eluted protein fractions from step 2 were pooled for further purification. All chemicals are of research grade and purchased from Sigma (Deisenhofen) or Merck (Darmstadt).

[0695] Gel filtration chromatography was performed on a HiLoad 16/60 Superdex 200 prep grade column (GE/Amersham) equilibrated with Equi-buffer (25 mM Citrate, 200 mM Lysine, 5% Glycerol, pH 7.2). Eluted protein samples (flow rate 1 ml/min) were subjected to standard SDS-PAGE and Western Blot for detection. Prior to purification, the column was calibrated for molecular weight determination (molecular weight marker kit, Sigma MW GF-200). Protein concentrations were determined using OD280 nm.

[0696] Purified bispecific single chain antibody protein was analyzed in SDS PAGE under reducing conditions performed with pre-cast 4-12% Bis Tris gels (Invitrogen). Sample preparation and application were performed according to the protocol provided by the manufacturer. The molecular weight was determined with MultiMark protein standard (Invitrogen). The gel was stained with colloidal Coomassie (Invitrogen protocol). The purity of the isolated protein is >95% as determined by SDS-PAGE.

[0697] The bispecific single chain antibody has a molecular weight of about 52 kDa under native conditions as determined by gel filtration in phosphate buffered saline (PBS). All constructs were purified according to this method.

[0698] Western Blot was performed using an Optitran® BA-S83 membrane and the Invitrogen Blot Module according to the protocol provided by the manufacturer. For detection of the bispecific single chain antibody protein antibodies an anti-His Tag antibody was used (Penta His, Qiagen). A Goat-anti-mouse Ig antibody labeled with alkaline phosphatase (AP) (Sigma) was used as secondary antibody and BCIP/NBT (Sigma) as substrate. A single band was detected at 52 kD corresponding to the purified bispecific single chain antibody.

[0699] Alternatively, constructs were transiently expressed in DHFR deficient CHO cells. In brief, 4×105 cells per construct were cultivated in 3 ml RPMI 1640 all medium with stabilized glutamine supplemented with 10% fetal calf serum, 1% penicillin/streptomycin and nucleosides from a stock solution of cell culture grade reagents (Sigma-Aldrich Chemie GmbH, Taufkirchen, Germany) to a final concentration of 10 μg/ml Adenosine, 10 μg/ml Deoxyadenosine and 10 μg/ml Thymidine, in an incubator at 37° C., 95% humidity and 7% CO₂ one day before transfection. Transfection was performed with Fugene 6 Transfection Reagent (Roche, #11815091001) according to the manufacturer's protocol. 94 μl OptiMEM medium (Invitrogen) and 6 μl Fugene 6 are mixed and incubated for 5 minutes at room temperature. Subsequently, 1.5 μg DNA per construct were added, mixed and incubated for 15 minutes at room temperature. Meanwhile, the DHFR deficient CHO cells were washed with 1× PBS and resuspended in 1.5 ml RPMI 1640 all medium. The transfection mix was diluted with 600 μl RPMI 1640 all medium, added to the cells and incubated overnight at 37° C., 95% humidity and 7% CO₂. The day after transfection the incubation volume of each approach was extended to 5 ml RPMI 1640 all medium. Supernatant was harvested after 3 days of incubation.

### 10. Flow Cytometric Binding Analysis of the MCSP and CD3 Cross-Species Specific Bispecific Antibodies

[0700] In order to test the functionality of the cross-species specific bispecific antibody constructs regarding the capability to bind to human and macaque MCSP D3 and CD3, respectively, a FACS analysis was performed. For this purpose CHO cells transfected with human MCSP D3 (as described in Example 7) and the human CD3 positive T cell leukemia cell line HPB-ALL (DSMZ, Braunschweig, ACC483) were used to test the binding to human antigens. The binding reactivity to macaque antigens was tested by using the generated macaque MCSP D3 transfectant (described in Example 8) and a macaque T cell line 4119LnPx (kindly provided by Prof. Fickenscher, Hygiene Institute, Virology, Erlangen-Nuernberg; published in Knappe A, et al., and Fickenscher H., Blood 2000, 95, 3256-61). 200.000 cells of the respective cell lines were incubated for 30 min on ice with 50 μl of the purified protein of the cross-species specific bispecific antibody constructs (2 μg/ml) or cell culture supernatant of transfected cells expressing the cross-species specific bispecific antibody constructs. The cells were washed twice in PBS with 2% FCS and binding of the construct was detected with a murine anti-His antibody (Penta His antibody; Qiagen; diluted 1:20 in 50 μl PBS with 2% FCS). After washing, bound anti-His antibodies were detected with an Fc gamma-specific antibody (Dianova) conjugated to phycoerythrin, diluted 1:100 in PBS with 2% FCS. Supernatant of untransfected CHO cells was used as negative control for binding to the T cell lines. A single chain construct with irrelevant target specificity was used as negative control for binding to the MCSP-D3 transfected CHO cells.

[0701] Flow cytometry was performed on a FACS-Calibur apparatus; the CellQuest software was used to acquire and analyze the data (Becton Dickinson biosciences, Heidelberg). FACS staining and measuring of the fluorescence intensity were performed as described in Current Protocols in Immunology (Coligan, Kruisbeek, Margulies, Shevach and Strober, Wiley-Interscience, 2002).

[0702] The bispecific binding of the single chain molecules listed above, which are cross-species specific for MCSP D3 and cross-species specific for human and macaque CD3 was clearly detectable as shown in FIGS. 10, 11, 12 and 39. In the FACS analysis all constructs showed binding to CD3 and MCSP D3 as compared to the respective negative controls. Cross-species specificity of the bispecific antibodies to human and macaque CD3 and MCSP D3 antigens was demonstrated.

### 11. Bioactivity of MCSP and CD3 Cross-Species Specific Bispecific Single Chain Antibodies

[0703] Bioactivity of the generated bispecific single chain antibodies was analyzed by chromium 51 (⁵¹Cr) release in vitro cytotoxicity assays using the MCSP D3 positive cell lines described in Examples 7 and 8. As effector cells stimulated human CD4/CD56 depleted PBMC, stimulated human PBMC or the macaque T cell line 4119LnPx are used as specified in the respective figures.

[0704] Generation of the stimulated CD4/CD56 depleted PBMC was performed as follows: Coating of a Petri dish (145 mm diameter, Greiner bio-one GmbH, Kremsmonster) was carried out with a commercially available anti-CD3 specific antibody (e.g. OKT3, Othoclone) in a final concentration of 1 μg/ml for 1 hour at 37° C. Unbound protein was removed by one washing step with PBS. The fresh PBMC were isolated from peripheral blood (30-50 ml human blood) by Ficoll gradient centrifugation according to standard protocols. 3-5×10⁷ PBMC were added to the precoated petri dish in 120 ml of RPMI 1640 with stabilized glutamine/10% FCS/IL-2 20 U/ml (Proleukin, Chiron) and stimulated for 2 days. On the third day the cells were collected and washed once with RPMI 1640. IL-2 was added to a final concentration of 20 U/ml and the cells were cultivated again for one day in the same cell culture medium as above. By depletion of CD4+ T cells and CD56+ NK cells according to standard protocols CD8+ cytotoxic T lymphocytes (CTLs) were enriched.

[0705] Target cells were washed twice with PBS and labelled with 11.1 MBq ⁵¹Cr in a final volume of 100 μl RPMI with 50% FCS for 45 minutes at 37° C. Subsequently the labelled target cells were washed 3 times with 5 ml RPMI and then used in the cytotoxicity assay. The assay was performed in a 96 well plate in a total volume of 250 μl supplemented RPMI (as above) with an E:T ratio 10:1. 1 μg/ml of the cross-species specific bispecific single chain antibody molecules and 20 threefold dilutions thereof were applied. If using supernatant containing the cross-species specific bispecific single chain antibody molecules, 21 two- and 20 threefold dilutions thereof were applied for the macaque and the human cytotoxicity assay, respectively. The assay time was 18 hours and cytotoxicity was measured as relative values of released chromium in the supernatant related to the difference of maximum lysis (addition of Triton-X) and spontaneous lysis (without effector cells). All measurements were done in quadruplicates. Measurement of chromium activity in the supernatants was performed with a Wizard 3” gamma counter (Perkin Elmer Life Sciences GmbH, Köln, Germany). Analysis of the experimental data was performed with Prism 4 for Windows (version 4.02, GraphPad Software Inc., San Diego, California, USA). Sigmoidal dose response curves typically have R² values>0.90 as determined by the software. EC₅₀ values calculated by the analysis program were used for comparison of bioactivity.

[0706] As shown in FIGS. 13 to 17 and 40, all of the generated cross-species specific bispecific single chain antibody constructs demonstrate cytotoxic activity against human MCSP D3 positive target cells elicited by stimulated human CD4/CD56 depleted PBMC or stimulated PBMC and against macaque MCSP D3 positive target cells elicited by the macaque T cell line 4119LnPx.

### 12. Plasma Stability of MCSP and CD3 Cross-Species Specific Bispecific Single Chain Antibodies

Stability of the generated bispecific single chain antibodies in human plasma was analyzed by incubation of the bispecific single chain antibodies in 50% human Plasma at 37° C. and 4° C. for 24 hours and subsequent testing of bioactivity. Bioactivity was studied in a chromium 51 (⁵¹Cr) release in vitro cytotoxicity assay using a MCSP positive CHO cell line (expressing MCSP as cloned according to example 14 or 15) as target and stimulated human CD8 positive T cells as effector cells.

[0707] EC₅₀ values calculated by the analysis program as described above were used for comparison of bioactivity of bispecific single chain antibodies incubated with 50% human plasma for 24 hours at 37° C. and 4° C. respectively with bispecific single chain antibodies without addition of plasma or mixed with the same amount of plasma immediately prior to the assay.

[0708] As shown in FIG. 18 and Table 2 the bioactivity of the G4 H-L× I2C H-L, G4 H-L× H2C H-L and G4 H-L× F12Q H-L bispecific antibodies was not significantly reduced as compared with the controls without the addition of plasma or with addition of plasma immediately before testing of bioactivity.

TABLE 2
bioactivity of the bispecific antibodies
without or with the addition of Plasma

| | Without | With | Plasma | Plasma |
|---|---|---|---|---|
| Construct | plasma | plasma | 37° C. | 4° C. |
| G4 H-L × | 300 | 796 | 902 | 867 |
| I2C H-L | | | | |
| G4 H-L × | 496 | 575 | 2363 | 1449 |
| H2C H-L | | | | |
| G4 H-L × | 493 | 358 | 1521 | 1040 |
| F12Q H-L | | | | |

13. Redistribution of Circulating T Cells in the Absence of Circulating Target Cells by First Exposure to CD3 Binding Molecules Directed at Conventional i.e. Context Dependent CD3 Epitopes is a Major Risk Factor for Adverse Events Related to the Initiation of Treatment
T Cell Redistribution in Patients with B-Cell Non-Hodgkin-Lymphoma (B-NHL) Following Initiation of Treatment with the Conventional CD3 Binding Molecule

[0709] A conventional CD19×CD3 binding molecules is a CD3 binding molecule of the bispecific tandem scFv format (Loffler (2000, Blood, Volume 95, Number 6) or WO 99/54440). It consists of two different binding portions directed at (i) CD19 on the surface of normal and malignant human B cells and (ii) CD3 on human T cells. By crosslinking CD3 on T cells with CD19 on B cells, this construct triggers the redirected lysis of normal and malignant B cells by the cytotoxic activity of T cells. The CD3 epitope recognized by such a conventional CD3 binding molecule is localized on the CD3 epsilon chain, where it only takes the correct conformation if it is embedded within the rest of the epsilon chain and held in the right position by heterodimerization of the epsilon chain with either the CD3 gamma or delta chain. Interaction of this highly context dependent epitope with a conventional CD3 binding molecule (see e.g. Loffler (2000, Blood, Volume 95, Number 6) or WO 99/54440)—even when it occurs in a purely monovalent fashion and without any crosslinking—can induce an allosteric change in the conformation of CD3 leading to the exposure of an otherwise hidden proline-rich region within the cytoplasmic domain of CD3 epsilon. Once exposed, the proline-rich region can recruit the signal transduction molecule Nck2, which is capable of triggering further intracellular signals. Although this is not sufficient for full T cell activation, which definitely requires crosslinking of several CD3 molecules on the T cell surface, e.g. by crosslinking of several anti-CD3 molecules bound to several CD3 molecules on a T cell by several CD19 molecules on the surface of a B cell, pure monovalent interaction of conventional CD3 binding molecules to their context dependent epitope on CD3 epsilon is still not inert for T cells in terms of signalling. Without being bound by theory, monovalent conventional CD3 binding molecules (known in the art) may induce some T cell reactions when infused into humans even in those cases where no circulating target cells are available for CD3 crosslinking. An important T cell reaction to the intravenous infusion of monovalent conventional CD19×CD3 binding molecule into B-NHL patients who have essentially no circulating CD19-positive B cells is the redistribution of T cells after start of treatment. It has been found in a phase I clinical trial that this T cell reaction occurs during the starting phase of intravenous CD19×CD3 binding molecule infusion in all individuals without circulating CD19-positive target B cells essentially independent of the CD19×CD3 binding molecule dose (FIG. 19). However, sudden increases in CD19×CD3 binding molecule exposure have been found to trigger virtually the same redistributional T cell reaction in these patients as the initial exposure of T cells to CD19×CD3 binding molecule at treatment start (FIG. 20A) and even gradual increases in CD19×CD3 binding molecule exposure still can have redistributional effects on circulating T cells (FIG. 21). Moreover, it has been found that this essentially dose-independent redistributional T cell reaction in the absence of circulating target cells as triggered by conventional CD3 binding molecules like the CD19×CD3 binding molecule (e.g. disclosed in WO 99/54440) in 100% of all treated individuals is a major risk factor for adverse events related to the initiation of treatment.

[0710] According to the study protocol, patients with relapsed histologically confirmed indolent B-cell Non-Hodgkin-Lymphoma (B-NHL) including mantle cell lymphoma were recruited in an open-label, multi-center phase I interpatient dose-escalation trial. The study protocol was approved by the independent ethics committees of all participating centers and sent for notification to the responsible regulatory authority. Measurable disease (at least one lesion 1.5 cm) as documented by CT scan was required for inclusion into the study. Patients received conventional CD19×CD3 binding molecule by continuous intravenous infusion with a portable minipump system over four weeks at constant flow rate (i.e. dose level). Patients were hospitalized during the first two weeks of treatment before they were released from the hospital and continued treatment at home. Patients without evidence of disease progression after four weeks were offered to continue treatment for further four weeks. So far six different dose levels were tested without reaching a maximum tolerated dose (MTD): 0.5, 1.5, 5, 15, 30 and 60 μg/m²/24 h. Cohorts consisted of three patients each if no adverse events defined by the study protocol as DLT (dose limiting toxicity) were observed. In case of one DLT among the first three patients the cohort was expanded to six patients, which—in the absence of a second DLT—allowed further dose escalation. Accordingly, dose levels without DLT in cohorts with 3 patients or with one DLT in cohorts with 6 patients were regarded as safe. Study treatment was stopped in all patients who developed a DLT. At 15 and 30 μg/m²/24 h different modes of treatment initiation during the first 24 h were tested in several additional cohorts: (i) Stepwise increase after 5 μg/m²/24 h for the first 24 h to 15 μg/m²/24 h maintenance dose (patient cohort 15-step), (ii) even continuous increase of flow-rate from almost zero to 15 or 30 μg/m²/24 h (patient cohorts 15-ramp and 30-ramp) and (iii) start with the maintenance dose from the very beginning (patient cohorts 15-flat, 30-flat and 60-flat). Patient cohorts at dose levels 0.5, 1.5 and 5 μg/m²/24 h were all started with the maintenance dose from the very beginning (i.e. flat initiation).

[0711] Time courses of absolute B-and T-cell counts in peripheral blood were determined by four color FACS analysis as follows:

### Collection of Blood Samples and Routine Analysis

[0712] In patient cohorts 15-ramp, 15-flat, 30-ramp, 30-flat and 60-flat blood samples (6 ml) were obtained before and 0.75, 2, 6, 12, 24, 30, 48 hours after start of CD19×CD3 binding molecule (as disclosed in WO 99/54440) infusion as well as on treatment days 8, 15, 17, 22, 24, 29, 36, 43, 50, 57 and 4 weeks after end of conventional CD19×CD3 binding molecule infusion using EDTA-containing Vacutainer™ tubes (Becton Dickinson) which were shipped for analysis at 4° C. In patient cohorts 15-step blood samples (6 ml) were obtained before and 6, 24, 30, 48 hours after start of CD19×CD3 binding molecule infusion as well as on treatment days 8, 15, 22, 29, 36, 43, 50, 57 and 4 weeks after end of CD19×CD3 binding molecule infusion. At dose levels 0.5, 1.5 and 5 μg/m²/24 h blood samples (6 ml) were obtained before and 6, 24, 48 hours after start of CD19×CD3 binding molecule infusion as well as on treatment days 8, 15, 22, 29, 36, 43, 50, 57 and 4 weeks after end of CD19×CD3 binding molecule infusion. In some cases slight variations of these time points occurred for operational reasons. FACS analysis of lymphocyte subpopulations was performed within 24-48 h after blood sample collection. Absolute numbers of leukocyte subpopulations in the blood samples were determined through differential blood analysis on a CoulterCounter™ (Coulter).

Isolation of PBMC from Blood Samples

[0713] PBMC (peripheral blood mononuclear cells) isolation was performed by an adapted Ficoll™ gradient separation protocol. Blood was transferred at room temperature into 10 ml Leucosep™ tubes (Greiner) pre-loaded with 3 ml Biocoll™ solution (Biochrom). Centrifugation was carried out in a swing-out rotor for 15 min at 1700×g and 22° C. without deceleration. The PBMC above the Biocoll™ layer were isolated, washed once with FACS buffer (PBS/2% FBS [Foetal Bovine Serum; Biochrom]), centrifuged and resuspended in FACS buffer. Centrifugation during all wash steps was carried out in a swing-out rotor for 4 min at 800×g and 4° C. If necessary, lysis of erythrocytes was performed by incubating the isolated PBMC in 3 ml erythrocyte lysis buffer (8.29 g NH₄Cl, 1.00 g KHCO₃, 0.037 g EDTA, ad 1.0 I H₂O_{bidest}, pH 7.5) for 5 min at room temperature followed by a washing step with FACS buffer.

Staining of PBMC with Fluorescence-Labeled Antibodies Against Cell Surface Molecules

[0714] Monoclonal antibodies were obtained from Invitrogen (¹Cat. No. MHCD1301, ²Cat. No. MHCD1401), Dako (⁵Cat. No. C7224) or Becton Dickinson (³Cat. No. 555516, ⁴Cat. No. 345766) used according to the manufacturers' recommendations. 5×10⁵-1×10⁶ cells were stained with the following antibody combination: anti-CD13¹/antiCD14² (FITC)×anti-CD56³ (PE)×anti-CD3⁴ (PerCP)×anti-CD19⁵ (APC). Cells were pelleted in V-shaped 96 well multititer plates (Greiner) and the supernatant was removed. Cell pellets were resuspended in a total volume of 100 μl containing the specific antibodies diluted in FACS buffer. Incubation was carried out in the dark for 30 min at 4° C. Subsequently, samples were washed twice with FACS buffer and cell pellets were resuspended in FACS buffer for flowcytometric analysis.

### Flowcytometric Detection of Stained Lymphocytes by FACS

[0715] Data collection was performed with a 4 color BD FACSCalibur™ (Becton Dickinson). For each measurement 1×10⁴ cells of defined lymphocyte subpopulations were acquired. Statistical analysis was performed with the program CellQuest Pro™ (Becton Dickinson) to obtain lymphocyte subpopulation percentages and to classify cell surface molecule expression intensity. Subsequently, percentages of single lymphocyte subsets related to total lymphocytes (i.e. B plus T plus NK cells excluding any myeloid cells via CD13/14-staining) as determined by FACS were correlated with the lymphocyte count from the differential blood analysis to calculate absolute cell numbers of T cells (CD3⁺, CD56⁻, CD13/14⁻) and B cells (CD19⁺, CD13/14⁻). T cell redistribution during the starting phase of conventional CD19×CD3 binding molecule (e.g. disclosed in WO 99/54440) treatment in all those patients who had essentially no circulating CD19-positive B cells at treatment start is shown in (FIG. 19). For comparison, a representative example of T cell redistribution during the starting phase of CD19×CD3 binding molecule treatment in a patient with a significant number of circulating CD19-positive B cells is shown in FIG. 22.

[0716] In both cases (i.e. essentially no or many circulating B cells) circulating T cell counts rapidly decrease upon treatment start. However, in the absence of circulating B cells T cells tend to return into the circulating blood very early, while the return of T cells into the circulating blood of those patients who have a significant number of circulating B cells at treatment start is usually delayed until these circulating B cells are depleted. Thus, the T cell redistribution patterns mainly differ in the kinetics of T cell reappearance in the circulating blood.

[0717] Assessment of efficacy based on CT scan was carried out by central reference radiology after 4 weeks of treatment and in patients receiving additional 4 weeks also after 8 weeks of treatment plus in all cases four weeks after end of treatment. Disappearance and/or normalization in size of all known lesions (including an enlarged spleen) plus clearance of bone marrow from lymphoma cells in cases of bone marrow infiltration was counted as complete response (CR). Reduction by at least 50% from baseline of the sum of products of the two biggest diameters (SPD) of each predefined target lesion was defined as partial response (PR); a reduction by at least 25% was regarded a minimal response (MR). Progressive disease (PD) was defined as >50% increase of SPD from baseline. SPD deviations from baseline between +50% and −25% were regarded as stable disease (SD).

[0718] Patient demographics, doses received and clinical outcome in 34 patients are summarized in Table 3. Clinical anti-tumor activity of the CD19×CD3 binding molecule was clearly dose dependent: Consistent depletion of circulating CD19-positive B (lymphoma) cell from peripheral blood was observed from 5 μg/m²/24 h onwards. At 15 μg/m²/24 h and 30 μg/m²/24 h first objective clinical responses (PRs and CRs) were recorded as well as cases of partial and complete elimination of B lymphoma cells from infiltrated bone marrow. Finally, at 60 μg/m²/24 h the response rate increased to 100% (PRs and CRs) and bone marrow clearance from B lymphoma cells was complete in all evaluable cases.

[0719] The CD19×CD3 binding molecule was well tolerated by the majority of patients. Most frequent adverse events of grades 1-4 in 34 patients, regardless of causality are summarized in Table 4. CD19×CD3 binding molecule-related adverse events usually were transient and fully reversible. In particular, there were 2 patients (patients #19 and #24 in Table 3) essentially without circulating CD19-positive B cells whose treatment was stopped early because of CNS adverse events (lead symptoms: confusion and disorientation) related to repeated T cell redistribution during the starting phase of CD19×CD3 binding molecule infusion.

[0720] One of these patients (#19) was in cohort 15-step. He received 5 μg/m²/24 h CD19×CD3 binding molecule for the first 24 h followed by sudden increase to 15 μg/m²/24 h maintenance dose. The corresponding T cell redistribution pattern shows that circulating T cell counts rapidly decreased upon start of infusion at 5 μg/m²/24 h followed by early reappearance of T cells in the circulating blood essentially without circulating CD19-positive B cells. As a consequence, the peripheral T cell counts had fully recovered when the CD19×CD3 binding molecule dose was increased after 24 h from 5 to 15 μg/m²/24 h. Therefore the dose step could trigger a second episode of T cell redistribution as shown in FIG. 20A. This repeated T cell redistribution was related with CNS side effects (lead symptoms: confusion and disorientation) in this patient, which led to the stop of infusion. The relationship between repeated T cell redistribution and such CNS adverse events was also observed in previous phase I clinical trials in B-NHL patients who received CD19×CD3 binding molecule (e.g. disclosed in WO 99/54440) as repeated bolus infusion for 2 to 4 hours each usually followed by 2 days of treatment free interval (FIG. 20B). Every single bolus infusion triggered one episode of T cell redistribution consisting of a fast decrease in circulating T cell counts and T cell recovery prior to the next bolus infusion. In total, CNS adverse events related to repeated T cell redistribution were observed in 5 out of 21 patients. FIG. 20B shows the representative example of one patient from the bolus infusion trials, who developed CNS symptoms after the third episode of T cell redistribution. Typically, patients with CNS adverse events in the bolus infusion trials also had low circulating B cell counts.

[0721] The second patient (#24) from the continuous infusion trial, whose treatment was stopped early because of CNS adverse events (lead symptoms: confusion and disorientation) related to repeated T cell redistribution during the starting phase of CD19×CD3 binding molecule infusion, was in cohort 15-flat. By mistake, this patient received an CD19×CD3 binding molecule infusion without additional HSA as required for stabilization of the drug. The resulting uneven drug flow triggered repeated episodes of T cell redistribution instead of only one (FIG. 23A) with the consequence that the infusion had to be stopped because of developing CNS symptoms. Yet, when the same patient was restarted correctly with CD19×CD3 binding molecule solution containing additional HSA for drug stabilization (e.g. disclosed in WO 99/54440), no repeated T cell redistribution was observed and the patient did not again develop any CNS symptoms (FIG. 23B). Because this patient also had essentially no circulating B cells, the circulating T cells could react with fast redistribution kinetics even to subtle changes in drug exposure as observed. The CNS adverse events related to T cell redistribution in patients who have essentially no circulating target cells can be explained by a transient increase of T cell adhesiveness to the endothelial cells followed by massive simultaneous adhesion of circulating T cells to the blood vessel walls with a consecutive drop of T cell numbers in the circulating blood as observed. The massive simultaneous attachment of T cells to the blood vessel walls can cause an increase in endothelial permeability and endothelial cell activation. The consequences of increased endothelial permeability are fluid shifts from the intravascular compartment into interstitial tissue compartments including the CNS interstitium. Endothelial cell activation by attached T cells can have procoagulatory effects (Monaco et al. J Leukoc Biol 71 (2002) 659-668) with possible disturbances in blood flow (including cerebral blood flow) particularly with regard to capillary microcirculation. Thus, CNS adverse events related to T cell redistribution in patients essentially without circulating target cells can be the consequence of capillary leak and/or disturbances in capillary microcirculation through adherence of T cells to endothelial cells. The endothelial stress caused by one episode of T cell redistribution is tolerated by the majority of patients, while the enhanced endothelial stress caused by repeated T cell redistribution frequently causes CNS adverse events. More than one episode of T cell redistribution may be less risky only in patients who have low baseline counts of circulating T cells. However, also the limited endothelial stress caused by one episode of T cell redistribution can cause CNS adverse events in rare cases of increased susceptibility for such events as observed in 1 out of 21 patients in the bolus infusion trials with the CD19×CD3 binding molecule.

[0722] Without being bound by theory, the transient increase of T cell adhesiveness to the endothelial cells in patients who have essentially no circulating target cells can be explained as T cell reaction to the monovalent interaction of a conventional CD3 binding molecule, like the CD19×CD3 binding molecule (e.g. WO 99/54440), to its context dependent epitope on CD3 epsilon resulting in an allosteric change in the conformation of CD3 followed by the recruitment of Nck2 to the cytoplasmic domain of CD3 epsilon as described above. As Nck2 is directly linked to integrins via PINCH and ILK (FIG. 28), recruitment of Nck2 to the cytoplasmic domain of CD3 epsilon following an allosteric change in the conformation of CD3 through binding of a conventional CD3 binding molecule, like the CD19×CD3 binding molecule, to its context dependent epitope on CD3 epsilon, can increase the adhesiveness of T cells to endothelial cells by transiently switching integrins on the T cell surface into their more adhesive isoform via inside-out-signalling.

TABLE 3
Patient demographics and clinical outcome

| | | | | | | Best |
|---|---|---|---|---|---|---|
| | | | | | | Response* |
| | | | Disease | | | (CR Duration |
| | | Age/ | (Ann Arbor | Dose Level | Clearance of | in Months or |
| Cohort | Patient | Sex | Classification) | [mg/m²/Day] | Bone Marrow | Weeks) |
| 1 | 1 | 71/m | IC, Binet C | 0.0005 | None | SD |
| | 2 | 67/f | MCL, Stage | 0.0005 | n.d. | PD |
| | | | IV/A/E | | | |
| | 3 | 67/m | CLL, Stage | 0.0005 | n.d. | MR |
| | | | IV/B/E | | | |
| 2 | 4 | 69/m | MCL, Stage | 0.0015 | n.i. | SD |
| | | | IV/B | | | |
| | 5 | 49/m | MCL, Stage | 0.0015 | n.d. | SD |
| | | | IV/A/S | | | |
| | 6 | 71/m | MCL, Stage | 0.0015 | n.i. | PD |
| | | | IV/B/E | | | |
| | 7 | 77/m | MCL, Stage | 0.0015 | n.i. | SD |
| | | | IV/B/E/S | | | |
| | 8 | 65/m | CLL, Stage | 0.0015 | n.d. | PD |
| | | | IV/B/E/S | | | |
| | 9 | 75/m | FL, Stage II/B | 0.0015 | n.i. | SD |
| 3 | 10 | 58/m | MCL, Stage | 0.005 | n.i. | PD |
| | | | III/B/S | | | |
| | 11 | 68/f | FL, Stage IV/B | 0.005 | n.d. | SD |
| | 12 | 65/m | MCL, Stage | 0.005 | n.i. | SD |
| | | | III/A/E | | | |
| 4^{a} | 13 | 60/m | SLL, Stage | 0.015 | Complete | PR |
| | | | IV/B/S | | | |
| | 14 | 73/m | MCL, Stage | 0.015 | n.i. | SD |
| | | | II/A/E | | | |
| | 15 | 44/m | FL, Stage | 0.015 | Partial | PR |
| | | | IV/B/E/S | | | |
| | 16 | 61/m | FL, Stage | 0.015 | Complete | CR (7 mo) |
| | | | IV/A/S | | | |
| | 17 | 67/m | MZL, Stage | 0.015 | n.i. | n.e. |
| | | | IV/B/S | | | |
| | 18 | 64/m | FL, Stage | 0.015 | n.i. | PD |
| | | | IV/A/E | | | |
| | 19 | 75/m | MCL, Stage | 0.015 | n.i. | n.e. |
| | | | III/A | | | |
| | 20 | 65/f | FL; Stage III/A | 0.015 | n.i. | SD |
| | 21 | 60/m | MCL, Stage | 0.015 | None | SD |
| | | | IV/A/E | | | |
| | 22 | 67/f | FL, Stage IV/B | 0.015 | Complete | MR |
| | 23 | 67/m | DLBCL, Stage | 0.015 | n.i. | n.e. |
| | | | III/B | | | |
| | 24 | 65/f | FL, Stage III/A | 0.015 | n.d. | SD |
| | 25 | 74/f | WD, Stage IV/B | 0.015 | Partial | SD |
| 5 | 26 | 67/m | MCL, Stage | 0.03 | Complete | SD |
| | | | IV/A | | | |
| | 27 | 48/m | FL, Stage III/A | 0.03 | n.i. | PD |
| | 28 | 58/m | MCL, Stage | 0.03 | n.i. | CR (10 mo+) |
| | | | III/A | | | |
| | 29 | 45/f | MCL, Stage | 0.03 | Partial | PD |
| | | | IV/B | | | |
| | 30 | 59/m | MZL, Stage | 0.03 | n.i. | n.e. |
| | | | III/A | | | |
| | 31 | 43/m | FL, Stage III/A | 0.03 | n.i. | MR |
| 6 | 32 | 72/m | MCL, Stage | 0.06 | Complete | PR |
| | | | IV/A | | | |
| | 33 | 55/m | MCL, Stage | 0.06 | Complete | CR (4 mo+) |
| | | | IV/B | | | |
| | 34 | 52/m | FL, Stage IV/A | 0.06 | n.i. | CR^{b} (1 w+) |

*Centrally confirmed complete (CR) and partial (PR) responses by Cheson criteria in bold; MR, minimal response (≥25 to <50%); SD, stable disease; PD, progressive disease; duration from first documentation of response in parentheses; + denotes an ongoing response
^{a}Cohort 4 was expanded to study three different schedules of treatment initiation
^{b}PR after 8 weeks of treatment that turned into a CR after an additional treatment cycle of 4 weeks at the same dose following 7 weeks of treatment free interval
n.e.: not evaluable, because of treatment period <7 d
n.d.: not determined (infiltrated, but no second biopsy performed at end of treatment)
n.i.: not infiltrated at start of treatment

TABLE 4
Incidence of adverse events observed during treatment

Adverse events regardless of

| relationship, occuring in ≥3 patients | Grade 1-4 | | Grade 3-4 | |
|---|---|---|---|---|
| (N = 34) | N (%) | | N (%) | |
| Pyrexia | 22 | (64.7) | 2 | (5.9) |
| Leukopenia | 21 | (61.8) | 11 | (32.4) |
| Lymphopenia | 21 | (61.8) | 21 | (61.8) |
| Coagulopathy (increase in D-dimers) | 16 | (47.1) | 6 | (17.6) |
| Enzyme abnormality (AP, LDH, CRP) | 16 | (47.1) | 10 | (29.4) |
| Hepatic function abnormality (ALT, AST, | 16 | (47.1) | 1 | (2.9) |
| GGT) | | | | |
| Anaemia | 13 | (38.2) | 5 | (14.7) |
| Chills | 13 | (38.2) | 0 | (0.0) |
| Headache | 12 | (35.3) | 1 | (2.9) |
| Hypokalaemia | 12 | (35.3) | 2 | (5.9) |
| Thrombocytopenia | 12 | (35.3) | 6 | (17.6) |
| Weight increased | 12 | (35.3) | 0 | (0.0) |
| Hyperglycaemia | 11 | (32.4) | 2 | (5.9) |
| Neutropenia | 11 | (32.4) | 8 | (23.5) |
| Haematuria | 10 | (29.4) | 0 | (0.0) |
| Oedema peripheral | 10 | (29.4) | 2 | (5.9) |
| Anorexia | 9 | (26.5) | 1 | (2.9) |
| Diarrhoea | 9 | (26.5) | 0 | (0.0) |
| Weight decreased | 9 | (26.5) | 0 | (0.0) |
| Fatigue | 8 | (23.5) | 1 | (2.9) |
| Proteinuria | 8 | (23.5) | 0 | (0.0) |
| Hypocalcaemia | 7 | (20.6) | 2 | (5.9) |
| Pancreatic enzyme abnormality | 7 | (20.6) | 0 | (0.0) |
| Cough | 6 | (17.6) | 0 | (0.0) |
| Dyspnoea | 6 | (17.6) | 0 | (0.0) |
| Back pain | 5 | (14.7) | 0 | (0.0) |
| Catheter site pain | 5 | (14.7) | 0 | (0.0) |
| Hyperbilirubinaemia | 5 | (14.7) | 2 | (5.9) |
| Hypoalbuminaemia | 5 | (14.7) | 0 | (0.0) |
| Hypogammaglobulinemia | 5 | (14.7) | 1 | (2.9) |
| Hypoproteinaemia | 5 | (14.7) | 0 | (0.0) |
| Pleural effusion | 5 | (14.7) | 1 | (2.9) |
| Vomiting | 5 | (14.7) | 0 | (0.0) |
| Asthenia | 4 | (11.8) | 1 | (2.9) |
| Confusional state | 4 | (11.8) | 0 | (0.0) |
| Constipation | 4 | (11.8) | 0 | (0.0) |
| Dizziness | 4 | (11.8) | 0 | (0.0) |
| Hypertension | 4 | (11.8) | 0 | (0.0) |
| Hyponatraemia | 4 | (11.8) | 2 | (5.9) |
| Mucosal dryness | 4 | (11.8) | 0 | (0.0) |
| Muscle spasms | 4 | (11.8) | 0 | (0.0) |
| Nausea | 4 | (11.8) | 0 | (0.0) |
| Night sweats | 4 | (11.8) | 0 | (0.0) |
| Abdominal pain | 3 | (8.8) | 1 | (2.9) |
| Ascites | 3 | (8.8) | 0 | (0.0) |
| Hypercoagulation | 3 | (8.8) | 0 | (0.0) |
| Hyperhidrosis | 3 | (8.8) | 0 | (0.0) |
| Hypoglobulinaemia | 3 | (8.8) | 0 | (0.0) |
| Insomnia | 3 | (8.8) | 0 | (0.0) |
| Liver disorder | 3 | (8.8) | 1 | (2.9) |
| Nasopharyngitis | 3 | (8.8) | 0 | (0.0) |
| Pruritus | 3 | (8.8) | 0 | (0.0) |

Abbreviations used are:
AE, adverse event;
AP, alkaline phosphatase;
LDH, lactate dehydrogenase;
CRP, C-reactive protein;
ALT, alanine transaminase;
AST, aspartate transaminase;
GGT, gamma-glutamyl transferase;
AE data from the additional treatment cycle of patient 34 not yet included.
As explained above, conventional CD3 binding molecules (e.g. disclosed in WO 99/54440) capable of binding to a context-dependent epitope, though functional, lead to the undesired effect of T cell redistribution in patients causing CNS adverse events. In contrast, binding molecules of the present invention, by binding to the context-independent N-terminal 1-27 amino acids of the CD3 epsilon chain, do not lead to such T cell redistribution effects. As a consequence, the CD3 binding molecules of the invention are associated with a better safety profile compared to conventional CD3 binding molecules.

### 14. Bispecific CD3 Binding Molecules of the Invention Inducing T Cell Mediated Target Cell Lysis by Recognizing a Surface Target Antigen Deplete Target Antigen Positive Cells In Vivo

A Bispecific CD3 Binding Molecule of the Invention Recognizing CD33 as Target Antigen Depletes CD33-Positive Circulating Monocytes from the Peripheral Blood of Cynomolgus Monkeys

[0723] CD33-AF5 VH-VL× I2C VH-VL (amino acid sequence: SEQ ID NO.267) was produced by expression in CHO cells using the coding nucleotide sequence SEQ ID NO. 268. The coding sequences of (i) an N-terminal immunoglobulin heavy chain leader comprising a start codon embedded within a Kozak consensus sequence and (ii) a C-terminal His₆-tag followed by a stop codon were both attached in frame to the nucleotide sequence SEQ ID NO 268 prior to insertion of the resulting DNA-fragment as obtained by gene synthesis into the multiple cloning site of the expression vector pEF-DHFR (Raum et al. Cancer Immunol Immunother 50 (2001) 141-150). Stable transfection of DHFR-deficient CHO cells, selection for DHFR-positive transfectants secreting the CD3 binding molecule CD33-AF5 VH-VL× I2C VH-VL into the culture supernatant and gene amplification with methotrexat for increasing expression levels were carried out as described (Mack et al. Proc. Natl. Acad. Sci. USA 92 (1995) 7021-7025). The analytical SEC-profile of CD33-AF5 VH-VL× I2C VH-VL for use in cynomolgus monkeys revealed that the test material almost exclusively consisted of monomer. The potency of the test material was measured in a cytotoxicity assay as described in example 16.5 using CHO cells transfected with cynomolgus CD33 as target cells and the macaque T cell line 4119LnPx as source of effector cells (FIG. 25). The concentration of CD33-AF5 VH-VL× I2C VH-VL required for half-maximal target cell lysis by the effector T cells (EC50) was determined to be 2.7 ng/ml. Young (approx. 3 years old) adult cynomolgus monkeys (Macaca fascicularis) were treated by continuous intravenous infusion of CD3 binding molecule CD33-AF5 VH-VL×I2C VH-VL at different flow-rates (i.e. dose levels) to study depletion of circulating CD33-positive monocytes from the peripheral blood. This situation is equivalent to the treatment with the conventional CD3 binding molecule CD19×CD3 (specific for CD19 on B cells and CD3 on T cells) of those B-NHL patients, who have circulating CD19-positive target B cells (see e.g. WO99/54440). Depletion of circulating CD19-positive target B cells from the peripheral blood had turned out as a valid surrogate for the general clinical efficacy of the conventional CD3 binding molecule (CD19×CD3 as provided in WO99/54440) in patients with CD19-positive B-cell malignomas like B-NHL. Likewise, depletion of circulating CD33-positive monocytes from the peripheral blood is regarded as a valid surrogate of the general clinical efficacy of CD33-directed bispecific CD3 binding molecules of the invention like CD33-AF5 VH-VL× I2C VH-VL in patients with CD33-positive myeloid malignomas like AML (acute myeloid leukemia).

[0724] Continuous infusion was carried out according to the Swivel method as follows: The monkeys are catheterized via the vena femoralis into the vena cava caudalis using a vein catheter. The catheter is tunneled subcutaneously to the dorsal shoulder region and exteriorized at the caudal scapula. Then a tube is passed through a jacket and a protection spring. The jacket is fastened around the animal and the catheter, via the tube, is connected to an infusion pump.

[0725] Administration solution (1.25 M lysine, 0.1% tween 80, pH 7) without test material was infused continuously at 48 ml/24 h for 7 days prior to treatment start to allow acclimatization of the animals to the infusion conditions. Treatment was started by adding CD33-AF5 VH-VL× I2C VH-VL test material to the administration solution at the amount required for each individual dose level to be tested (i.e. flow rate of CD33-AF5 VH-VL× I2C VH-VL). The infusion reservoir was changed every day throughout the whole acclimatization and treatment phase. Planned treatment duration was 7 days except for the 120 μg/m²/24 h dose level, where animals received 14 days of treatment.

[0726] Time courses of absolute counts in circulating T cells and CD33-positive monocytes were determined by 4-or 3-colour FACS analysis, respectively:

### Collection of Blood Samples and Routine Analysis

[0727] Blood samples (1 ml) were obtained before and 0.75, 2, 6, 12, 24, 30, 48, 72 hours after start of continuous infusion with MCSP-G4 VH-VL× I2C VH-VL as well as after 7 and 14 days (and after 9 days at the 120 μg/m²/24 h dose level) of treatment using EDTA-containing Vacutainer™ tubes (Becton Dickinson) which were shipped for analysis at 4° C. In some cases slight variations of these time points occurred for operational reasons. FACS analysis of lymphocyte subpopulations was performed within 24-48 h after blood sample collection. Absolute numbers of leukocyte subpopulations in the blood samples were determined through differential blood analysis in a routine veterinary lab.

Isolation of PBMC from Blood Samples

[0728] PBMC (peripheral blood mononuclear cells) were isolated in analogy to the protocol described in example 13, above, with adaptations of the used volumes.

Staining of PBMC with Fluorescence-Labeled Antibodies Against Cell Surface

[0729] Molecules Monoclonal antibodies reactive with cynomolgus antigens were obtained from Becton Dickinson (¹Cat. No. 345784, ²Cat. No. 556647, ³Cat. No. 552851, ⁶Cat. No. 557710), Beckman Coulter (⁴Cat. No. IM2470) and Miltenyi (⁵Cat. No. 130-091-732) and used according to the manufacturers' recommendations. 5×10⁵-1×10⁶ cells were stained with the following antibody combinations: anti-CD14¹ (FITC)×antiCD56² (PE)×anti-CD3³ (PerCP)×anti-CD19⁴ (APC) and anti-CD14¹ (FITC)×antiCD33⁵ (PE)×anti-CD16⁶ (Alexa Fluor 647™). Additional steps were performed as described in example 13, above.

### Flowcytometric Detection of Stained Lymphocytes by FACS

[0730] Data collection was performed with a 4 color BD FACSCalibur™ (Becton Dickinson). For each measurement 1×10⁴ cells of defined lymphocyte subpopulations were acquired. Statistical analysis was performed with the program CellQuest Pro™ (Becton Dickinson) to obtain lymphocyte subpopulation percentages and to classify cell surface molecule expression intensity. Subsequently, percentages of single lymphocyte subsets related to total lymphocytes (i.e. B plus T plus NK cells excluding myeloid cells via CD14-staining) as determined by FACS were correlated with the lymphocyte count from the differential blood analysis to calculate absolute cell numbers of T cells (CD3⁺, CD56⁻, CD14⁻). Absolute numbers of CD33-positive monocytes were calculated by multiplying the monocyte counts from the differential blood analysis with the corresponding ratios of CD33-positive monocytes (CD33³⁰, CD14⁺) to all monocytes (CD14⁺) as determined by FACS.

[0731] The percentage compared to baseline (i.e. 100%) of absolute circulating CD33-positive monocyte counts at the end of treatment with CD33-AF5 VH-VL× I2C VH-VL in 4 cohorts of 2 cynomolgus monkeys with inter-cohort dose escalation from 30 over 60 and 240 to 1000 μg/m²/24 h are shown in FIG. 26A.

[0732] As shown in FIG. 26A, continuous intravenous infusion of CD33-AF5 VH-VL× I2C VH-VL induces depletion of circulating CD33-positive monocytes in a dosedependent manner. While there was still no detectable depletion of circulating CD33-positive monocytes at 30 μg/m²/24 h, a first trend towards a reduction of CD33-positive monocyte counts became visible at 60 μg/m²/24 h after 7 days of treatment. At 240 μg/m²/24 h circulating CD33-positive monocytes were almost completely depleted from the peripheral blood after 3 days of treatment. This was reached even faster at 1000 μg/m²/24 h, where depletion of the circulating CD33-positive monocytes from the peripheral blood was completed already after 1 day of treatment. This finding was confirmed by the results shown in FIG. 26B demonstrating depletion of circulating CD33-positive monocytes by two thirds and 50% compared to the respective baseline in two cynomolgus monkeys treated by continuous infusion with CD33-AF5 VH-VL× I2C VH-VL at 120 μg/m²/24 h for 14 days.

[0733] This outcome is a clear signal clinical efficacy of the CD3 binding molecules of the invention in general and of bispecific CD33-directed CD3 binding molecules of the invention for the treatment of CD33-positive malignomas like AML in particularly. Moreover, the T cell redistribution during the starting phase of treatment with CD33-AF5 VH-VL× I2C VH-VL in the presence of circulating target cells (i.e. CD33-positive monocytes) seems to be less pronounced than T cell redistribution during the starting phase of treatment with conventional CD19×CD3 constructs, as described in WO99/54440 in B-NHL patients with a significant number of circulating target cells (i.e. CD19-positive B cells) as shown in FIG. 22. While T cells disappear completely from the circulation upon start of CD19×CD3 infusion and do not reappear until the circulating CD19-positive target B cells are depleted from the peripheral blood (FIG. 22), initial disappearance of circulating T cells is incomplete upon infusion start with CD33-AF5 VH-VL× I2C VH-VL and T cell counts recover still during the presence of circulating CD33-positive target cells (FIG. 26B). This confirms that CD3 binding molecules of the invention (directed against and generated against an epitope of human and non-chimpanzee primates CD3ε (epsilon) chain and being a part or fragment or the full length of the amino acid sequence as provided in SEQ ID Nos. 2, 4, 6, or 8) by recognizing a context-independent CD3 epitope show a more favorable T cell redistribution profile than conventional CD3 binding molecules recognizing a context-dependent CD3 epitope, like the binding molecules provided in WO99/54440.

15. CD3 Binding Molecules of the Invention Directed at Essentially Context Independent CD3 Epitopes by Inducing Less Redistribution of Circulating T Cells in the Absence of Circulating Target Cells Reduce the Risk of Adverse Events Related to the Initiation of Treatment
Reduced T Cell Redistribution in Cynomolgus Monkeys Following Initiation of Treatment with a Representative Cross-Species Specific CD3 Binding Molecule of the Invention

[0734] MCSP-G4 VH-VL× I2C VH-VL (amino acid sequence: SEQ ID NO. 193) was produced by expression in CHO cells using the coding nucleotide sequence SEQ ID NO. 194. The coding sequences of (i) an N-terminal immunoglobulin heavy chain leader comprising a start codon embedded within a Kozak consensus sequence and (ii) a C-terminal His6-tag followed by a stop codon were both attached in frame to the nucleotide sequence SEQ ID NO. 194 prior to insertion of the resulting DNA-fragment as obtained by gene synthesis into the multiple cloning site of the expression vector pEF-DHFR (Raum et al. Cancer Immunol Immunother 50 (2001) 141-150). Stable transfection of DHFR-deficient CHO cells, selection for DHFR-positive transfectants secreting the CD3 binding molecule MCSP-G4 VH-VL× I2C VH-VL into the culture supernatant and gene amplification with methotrexat for increasing expression levels were carried out as described (Mack et al. Proc. Natl. Acad. Sci. USA 92 (1995) 7021-7025). Test material for treatment of cynomolgus monkeys was produced in a 200-liter fermenter. Protein purification from the harvest was based on IMAC affinity chromatography targeting the C-terminal His6-tag of MCSP-G4 VH-VL× I2C VH-VL followed by preparative size exclusion chromatography (SEC). The total yield of final endotoxin-free test material was 40 mg. The test material consisted of 70% monomer, 30% dimer and a small contamination of higher multimer. The potency of the test material was measured in a cytotoxicity assay as described in example 11 using CHO cells transfected with cynomolgus MCSP as target cells and the macaque T cell line 4119LnPx as source of effector cells (FIG. 27). The concentration of MCSP-G4 VH-VL× I2C VH-VL required for half-maximal target cell lysis by the effector T cells (EC50) was determined to be 1.9 ng/ml.

[0735] Young (approx. 3 years old) adult cynomolgus monkeys (Macaca fascicularis) were treated by continuous intravenous infusion of CD3 binding molecule MCSP-G4 VH-VL×I2C VH-VL at different flow-rates (i.e. dose levels) to study redistribution of circulating T cells following initiation of treatment in the absence of circulating target cells. Although the CD3 binding molecule MCSP-G4 VH-VL× I2C VH-VL can recognize both cynomolgus MCSP and cynomolgus CD3, there are no circulating blood cells expressing MCSP. Therefore, the only interaction possible in the circulating blood is binding of the CD3-specific arm of MCSP-G4 VH-VL× I2C VH-VL to CD3 on T cells. This situation is equivalent to the treatment with the conventional CD3 binding molecule (CD19×CD3 binding molecule specific for CD19 on B cells and CD3 on T cells) of those B-NHL patients, who have no circulating CD19-positive target B cells as described in example 13.

[0736] Continuous infusion was carried out according to the Swivel method as follows: The monkeys are catheterized via the vena femoralis into the vena cava caudalis using a vein catheter. The catheter is tunneled subcutaneously to the dorsal shoulder region and exteriorized at the caudal scapula. Then a tube is passed through a jacket and a protection spring. The jacket is fastened around the animal and the catheter, via the tube, is connected to an infusion pump.

[0737] Administration solution (1.25 M lysine, 0.1% tween 80, pH 7) without test material was infused continuously at 48 ml/24 h for 7 days prior to treatment start to allow acclimatization of the animals to the infusion conditions. Treatment was started by adding MCSP-G4 VH-VL× I2C VH-VL test material to the administration solution at the amount required for each individual dose level to be tested (i.e. flow rate of MCSP-G4 VH-VL× I2C VH-VL). The infusion reservoir was changed every day throughout the whole acclimatization and treatment phase. Treatment duration was 7 days.

[0738] Time courses of absolute T-cell counts in peripheral blood were determined by four color FACS analysis as follows:

### Collection of Blood Samples and Routine Analysis

[0739] Blood samples (1 ml) were obtained before and 0.75, 2, 6, 12, 24, 30, 48, 72 hours after start of continuous infusion with MCSP-G4 VH-VL× I2C VH-VL as well as after 7 days of treatment using EDTA-containing Vacutainer™ tubes (Becton Dickinson) which were shipped for analysis at 4° C. In some cases slight variations of these time points occurred for operational reasons. FACS analysis of lymphocyte subpopulations was performed within 24-48 h after blood sample collection. Absolute numbers of leukocyte subpopulations in the blood samples were determined through differential blood analysis in a routine veterinary lab.

Isolation of PBMC from Blood Samples

[0740] PBMC were isolated in analogy to the protocol described in example 13, above, with adaptations of the used volumes.

Staining of PBMC with Fluorescence-Labeled Antibodies Against Cell Surface Molecules

[0741] Monoclonal antibodies reactive with cynomolgus antigens were obtained from Becton Dickinson (¹Cat. No. 345784, ²Cat. No. 556647, ³Cat. No. 552851) and Beckman Coulter (⁴Cat. No. IM2470) used according to the manufacturers' recommendations. 5×10⁵-1×10⁶ cells were stained with the following antibody combination: anti-CD14¹ (FITC)×anti-CD56² (PE)×anti-CD3³ (PerCP)×anti-CD19⁴ (APC). Additional steps were performed as described in example 13, above.

### Flowcytometric Detection of Stained Lymphocytes by FACS

[0742] Data collection was performed with a 4 color BD FACSCalibur™ (Becton Dickinson). For each measurement 1×10⁴ cells of defined lymphocyte subpopulations were acquired. Statistical analysis was performed with the program CellQuest Pro™ (Becton Dickinson) to obtain lymphocyte subpopulation percentages and to classify cell surface molecule expression intensity. Subsequently, percentages of single lymphocyte subsets related to total lymphocytes (i.e. B plus T plus NK cells excluding myeloid cells via CD14-staining) as determined by FACS were correlated with the lymphocyte count from the differential blood analysis to calculate absolute cell numbers of T cells (CD3⁺, CD56⁻, CD14⁻).

[0743] T cell redistribution during the starting phase of treatment with MCSP-G4 VH-VL× I2C VH-VL in cynomolgus monkeys at dose levels of 60, 240 and 1000 μg/m²/24 h is shown in FIG. 28. These animals showed no signs at all of any T cell redistribution during the starting phase of treatment, i.e. T cell counts rather increased than decreased upon treatment initiation. Given that T cell redistribution is consistently observed in 100% of all patients without circulating target cells, upon treatment initiation with the conventional CD3 binding molecule (e.g. CD19×CD3 construct as described in WO 99/54440) against a context dependent CD3 epitope, it was demonstrated that substantially less T cell redistribution in the absence of circulating target cells upon treatment initiation can be observed with a CD3 binding molecule of the invention directed and generated against an epitope of human an non-chimpanzee primate CD3 epsilon chain as defined by the amino acid sequence of anyone of SEQ ID NOs: 2, 4, 6, or 8 or a fragment thereof. This is in clear contrast to CD3-binding molecules directed against a context-dependent CD3 epitope, like the constructs described in WO 99/54440, The binding molecules against context-independent CD3 epitopes, as (inter alia) provided in any one of SEQ ID NOs: 2, 4, 6, or 8 (or fragments of these sequences) provide for this substantially less (detrimental and non-desired) T cell redistribution. Because T cell redistribution during the starting phase of treatment with CD3 binding molecules is a major risk factor for CNS adverse events, the CD3 binding molecules provided herein and capable of recognizing a context independent CD3 epitope have a substantial advantage over the CD3 binding molecules known in the art and directed against context-dependent CD3 epitopes. Indeed none of the cynomolgus monkeys treated with MCSP-G4 VH-VL× I2C VH-VL showed any signs of CNS symptoms.

[0744] The context-independence of the CD3 epitope is provided in this invention and corresponds to the first 27 N-terminal amino acids of CD3 epsilon) or fragments of this 27 amino acid stretch. This context-independent epitope is taken out of its native environment within the CD3 complex and fused to heterologous amino acid sequences without loss of its structural integrity. Anti-CD3 binding molecules as provided herein and generated (and directed) against a context-independent CD3 epitope provide for a surprising clinical improvement with regard to T cell redistribution and, thus, a more favorable safety profile. Without being bound by theory, since their CD3 epitope is context-independent, forming an autonomous selfsufficient subdomain without much influence on the rest of the CD3 complex, the CD3 binding molecules provided herein induce less allosteric changes in CD3 conformation than the conventional CD3 binding molecules (like molecules provided in WO 99/54440), which recognize context-dependent CD3 epitopes like molecules provided in WO 99/54440. As a consequence (again without being bound by theory), the induction of intracellular NcK2 recruitment by the CD3 binding molecules provided herein is also reduced resulting in less isoform switch of T cell integrins and less adhesion of T cells to endothelial cells. It is preferred that preparations of CD3 binding molecules of the invention (directed against and generated against a context-independent epitope as defined herein) essentially consists of monomeric molecules. These monomeric molecules are even more efficient (than dimeric or multimeric molecules) in avoiding T cell redistribution and thus the risk of CNS adverse events during the starting phase of treatment.

### 16. Generation and Characterization of CD33 and CD3 Cross-Species Specific Bispecific Single Chain Molecules

### 16.1. Generation of CHO Cells Expressing Human CD33

[0745] The coding sequence of human CD33 as published in GenBank (Accession number NM_001772) was obtained by gene synthesis according to standard protocols. The gene synthesis fragment was designed as to contain first a Kozak site for eukaryotic expression of the construct, followed by a 19 amino acid immunoglobulin leader peptide, followed in frame by the coding sequence of the mature human CD33 protein, followed in frame by the coding sequence of serine glycine dipeptide, a histidine₆-tag and a stop codon (the cDNA and amino acid sequence of the construct is listed under SEQ ID Nos 305 and 306). The gene synthesis fragment was also designed as to introduce restriction sites at the beginning and at the end of the fragment. The introduced restriction sites, EcoRI at the 5′ end and SaII at the 3′ end, were utilised in the following cloning procedures. The gene synthesis fragment was cloned via EcoRI and SaII into a plasmid designated pEF-DHFR (pEF-DHFR is described in Raum et al. Cancer Immunol Immunother 50 (2001) 141-150) following standard protocols. The aforementioned procedures were carried out according to standard protocols (Sambrook, Molecular Cloning; A Laboratory Manual, 3rd edition, Cold Spring Harbour Laboratory Press, Cold Spring Harbour, New York (2001)). A clone with sequence-verified nucleotide sequence was transfected into DHFR deficient CHO cells for eukaryotic expression of the construct. Eukaryotic protein expression in DHFR deficient CHO cells was performed as described by Kaufmann R. J. (1990) Methods Enzymol. 185, 537-566. Gene amplification of the construct was induced by increasing concentrations of methothrexate (MTX) to a final concentration of up to 20 nM MTX.

### 16.2. Generation of CHO Cells Expressing the Extracellular Domain of Macaque CD33

[0746] The cDNA sequence of macaque CD33 was obtained by a set of 3 PCRs on cDNA from macaque monkey bone marrow prepared according to standard protocols. The following reaction conditions: 1 cycle at 94° C. for 3 minutes followed by 35 cycles with 94° C. for 1 minute, 53° C. for 1 minute and 72° C. for 2 minutes followed by a terminal cycle of 72° C. for 3 minutes and the following primers were used:

1. forward primer:
(SEQ ID No. 369)
5′-gaggaattcaccatgccgctgctgctactgctgc
ccctgctgtgggcaggggccctggctatgg-3′
reverse primer:
(SEQ ID No. 370)
5′-gatttgtaactgtatttggtacttcc-3′
2. forward primer:
(SEQ ID No. 371)
5′-attccgcctccttggggatcc-3′
reverse primer:
(SEQ ID No. 372)
5′-gcataggagacattgagctggatgg-3′
3. forward primer:
(SEQ ID No. 373)
5′-gcaccaacctgacctgtcagg-3′
reverse primer:
(SEQ ID No. 374)
5′-agtgggtegactcactgggtcctgacctctgagtattcg-3′

[0747] Those PCRs generate three overlapping fragments, which were isolated and sequenced according to standard protocols using the PCR primers, and thereby provided a portion of the cDNA sequence of macaque CD33 from the second nucleotide of codon+2 to the third nucleotide of codon +340 of the mature protein. To generate a construct for expression of macaque CD33 a cDNA fragment was obtained by gene synthesis according to standard protocols (the cDNA and amino acid sequence of the construct is listed under SEQ ID Nos 307 and 308). In this construct the coding sequence of macaque CD33 from amino acid +3 to +340 of the mature CD33 protein was fused into the coding sequence of human CD33 replacing the human coding sequence of the amino acids +3 to +340. The gene synthesis fragment was also designed as to contain a Kozak site for eukaryotic expression of the construct and restriction sites at the beginning and the end of the fragment containing the cDNA coding for essentially the whole extracellular domain of macaque CD33, the macaque CD33 transmembrane domain and a macaque-human chimeric intracellular CD33 domain. The introduced restriction sites Xbal at the 5′ end and SaII at the 3′ end, were utilised in the following cloning procedures. The gene synthesis fragment was then cloned via Xbal and SaII into a plasmid designated pEF-DHFR (pEF-DHFR is described in Raum et al. Cancer Immunol Immunother 50 (2001) 141-150). A sequence verified clone of this plasmid was used to transfect CHO/dhfr-cells as described above.

### 16.3. Generation of CD33 and CD3 Cross-Species Specific Bispecific Antibody Molecules

### Cloning of Cross-Species Specific Binding Molecules

[0748] Generally, bispecific antibody molecules, each comprising a domain with a binding specificity cross-species specific for human and non-chimpanzee primate CD3 epsilon as well as a domain with a binding specificity cross-species specific for human and non-chimpanzee primate CD33, were designed as set out in the following Table 5:

TABLE 5
Formats of anti-CD3 and anti-CD33 cross-
species specific bispecific molecules

| SEQ ID (nucl/prot) | Formats of protein constructs (N → C) |
|---|---|
| 276/275 | AH11HL × H2CHL |
| 258/257 | AH3HL × H2CHL |
| 270/269 | AC8HL × H2CHL |
| 264/263 | AF5HL × H2CHL |
| 288/287 | F2HL × H2CHL |
| 300/299 | E11HL × H2CHL |
| 282/281 | B3HL × H2CHL |
| 294/293 | B10HL × H2CHL |
| 278/277 | AH11HL × F12QHL |
| 260/259 | AH3HL × F12QHL |
| 272/271 | AC8HL × F12QHL |
| 266/265 | AF5HL × F12QHL |
| 290/289 | F2HL × F12QHL |
| 302/301 | E11HL × F12QHL |
| 284/283 | B3HL × F12QHL |
| 296/295 | B10HL × F12QHL |
| 280/279 | AH11HL × I2CHL |
| 262/261 | AH3HL × I2CHL |
| 274/273 | AC8HL × I2CHL |
| 268/267 | AF5HL × I2CHL |
| 292/291 | F2HL × I2CHL |
| 304/303 | E11HL × I2CHL |
| 286/285 | B3HL × I2CHL |
| 298/297 | B10HL × I2CHL |

[0749] The aforementioned constructs containing the variable light-chain (L) and variable heavy-chain (H) domains cross-species specific for human and macaque CD33 and the CD3 specific VH and VL combinations cross-species specific for human and macaque CD3 were obtained by gene synthesis. The gene synthesis fragments were designed and eukaryotic protein expression was performed similar as described in example 9 for the MCSP and CD3 cross-species specific single chain molecules. The same holds true for the expression and purification of the CD33 and CD3 cross-species specific single chain molecules.

[0750] In the Western Blot a single band was detected at 52 kD corresponding to the purified bispecific antibody.

### 16.4. Flow Cytometric Binding Analysis of the CD33 and CD3 Cross-Species Specific Bispecific Antibodies

[0751] In order to test the functionality of the cross-species specific bispecific antibody constructs regarding the capability to bind to human and macaque CD33 and CD3, respectively, a FACS analysis was performed similar to the analysis described for the analysis of the MCSP and CD3 cross-species specific bispecific antibodies in example 10 using CHO cells expressing the human or macaque CD33 extracellular domains (see example 16.1 and 16.2).

[0752] The specific binding of human and non-chimpanzee primate CD3 of the CD3 binding molecules of the invention was clearly detectable as shown in FIG. 29. In the FACS analysis all constructs show binding to CD3 and CD33 as compared to the respective negative controls. Cross-species specificity of the bispecific antibodies to human and macaque CD3 and CD33 antigens is demonstrated.

### 16.5. Bioactivity of CD33 and CD3 Cross-Species Specific Bispecific Antibodies

[0753] Bioactivity of the generated bispecific antibodies was analyzed by chromium 51 (⁵¹Cr) release in vitro cytotoxicity assays using the CD33 positive cell lines described in Examples 16.1 and 16.2. As effector cells stimulated human CD4/CD56 depleted PBMC or the macaque T cell line 4119LnPx were used as specified in the respective figures. The cytotoxicity assays were performed similar to the setting described for the bioactivity analysis of the MCSP and CD3 cross-species specific bispecific antibodies in example 11 using CHO cells expressing the human or macaque CD33 extracellular domains (see example 16.1 and 16.2) as target cells.

[0754] As shown in FIG. 30, all of the generated cross-species specific bispecific constructs demonstrate cytotoxic activity against human CD33 positive target cells elicited by stimulated human CD4/CD56 depleted PBMC and against macaque CD33 positive target cells elicited by the macaque T cell line 4119LnPx.

### 17. Purification of Cross-Species Specific Bispecific Single Chain Molecules by an Affinity Procedure Based on the Context Independent CD3 Epsilon Epitope Corresponding to the N-Terminal Amino Acids 1-27

### 17.1 Generation of an Affinity Column Displaying the Isolated Context Independent Human CD3 Epsilon Epitope Corresponding to the N-Terminal Amino Acids 1-27

[0755] The plasmid for expression of the construct 1-27 CD3-Fc consisting of the 1-27 N-terminal amino acids of the human CD3 epsilon chain fused to the hinge and Fc gamma region of human immunoglobulin IgG1 described above (Example 3; cDNA sequence and amino acid sequence of the recombinant fusion protein are listed under SEQ ID NOs 230 and 229) was transfected into DHFR deficient CHO cells for eukaryotic expression of the construct. Eukaryotic protein expression in DHFR deficient CHO cells was performed as described by Kaufmann R. J. (1990) Methods Enzymol. 185, 537-566. Gene amplification of the construct was induced by increasing concentrations of methotrexate (MTX) to a final concentration of up to 20 nM MTX. After two passages of stationary culture the cells were grown in roller bottles with nucleoside-free HyQ PF CHO liquid soy medium (with 4.0 mM L-Glutamine with 0.1% Pluronic F-68; HyClone) for 7 days before harvest. The cells were removed by centrifugation and the supernatant containing the expressed protein was stored at −20° C. For the isolation of the fusion protein a goat anti-human fc affinity column was prepared according to standard protocols using a commercially available affinity purified goat anti-human IgG fc fragment specific antibody with minimal cross-reaction to bovine, horse, and mouse serum proteins (Jackson ImmunoResearch Europe Ltd.). Using this affinity column the fusion protein was isolated out of cell culture supernatant on an Äkta Explorer System (GE Amersham) and eluted by citric acid. The eluate was neutralized and concentrated. After dialysis against amine free coupling buffer the purified fusion protein was coupled to an N-Hydroxy-Succinimide NHS activated 1 ml HiTrap column (GE Amersham).

[0756] After coupling remaining NHS groups were blocked and the column was washed and stored at 5° C. in storage buffer containing 0.1% sodium azide.

### 17.2 Purification of Cross-Species Specific Bispecific Single Chain Molecules Using a Human CD3 Peptide Affinity Column

[0757] 200 ml cell culture supernatant of cells expressing cross-species specific bispecific single chain molecules were 0.2 μm sterile filtered and applied to the CD3 peptide affinity column using an Äkta Explorer system (GE Amersham).

[0758] The column was then washed with phosphate buffered saline PBS pH 7.4 to wash out unbound sample. Elution was done with an acidic buffer pH 3.0 containing 20 mM Citric acid and 1 M sodium chloride. Eluted protein was neutralized immediately by 1 M Trishydroxymethylamine TRIS pH 8.3 contained in the collection tubes of the fraction collector.

[0759] Protein analysis was done by SDS PAGE and Western Blot.

[0760] For SDS PAGE BisTris Gels 4-12% are used (Invitrogen). The running buffer was 1× MES-SDS-Puffer (Invitrogen). As protein standard 15 μl prestained Sharp Protein Standard (Invitrogen) was applied. Electrophoresis was performed for 60 minutes at 200 volts 120 mA max. Gels were washed in demineralised water and stained with Coomassie for one hour. Gels are destained in demineralised water for 3 hours. Pictures are taken with a Syngene Gel documentation system.

[0761] For Western Blot a double of the SDS PAGE gel was generated and proteins were electroblotted onto a nitrocellulose membrane. The membrane was blocked with 2% bovine serum albumin in PBS and incubated with a biotinylated murine Penta His antibody (Qiagen). As secondary reagent a streptavidin alkaline phosphatase conjugate (DAKO) was used. Blots were developed with BCIP/NBT substrate solution (Pierce).

[0762] As demonstrated in FIGS. 31, 32 and 33 the use of a human CD3 peptide affinity column as described above allows the highly efficient purification of the bispecific single chain molecules from cell culture supernatant. The cross-species specific anti-CD3 single chain antibodies contained in the bispecific single chain molecules therefore enable via their specific binding properties an efficient generic one-step method of purification for the cross-species specific bispecific single chain molecules, without the need of any tags solely attached for purification purposes.

### 18. Generic Pharmacokinetic Assay for Cross-Species Specific Bispecific Single Chain Molecules

### 18.1 Production of 1-27 CD3-Fc for Use in the Pharmacokinetic Assay

[0763] The coding sequence of the 1-27 N-terminal amino acids of the human CD3 epsilon chain fused to the hinge and Fc gamma region of human immunoglobulin IgG1 was obtained by gene synthesis according to standard protocols (cDNA sequence and amino acid sequence of the recombinant fusion protein are listed under SEQ ID NOs 309 and 310). The gene synthesis fragment was designed as to contain first a Kozak site for eukaryotic expression of the construct, followed by a 19 amino acid immunoglobulin leader peptide, followed in frame by the coding sequence of the first 27 amino acids of the extracellular portion of the mature human CD3 epsilon chain, followed in frame by the coding sequence of the hinge region and Fc gamma portion of human IgG1 and a stop codon. The gene synthesis fragment was also designed and cloned as described in example 3.1, supra. A clone with sequence-verified nucleotide sequence was transfected into DHFR deficient CHO cells for eukaryotic expression of the construct. Eukaryotic protein expression in DHFR deficient CHO cells was performed as described in example 9, supra. For the isolation of the fusion protein a goat anti-human fc affinity column was prepared according to standard protocols using a commercially available affinity purified goat anti-human IgG fc fragment specific antibody with minimal cross-reaction to bovine, horse, and mouse serum proteins (Jackson ImmunoResearch Europe Ltd.). Using this affinity column the fusion protein was isolated out of cell culture supernatant on an Äkta Explorer System (GE Amersham) and eluted by citric acid. The eluate was neutralized and concentrated.

### 18.2 Pharmacokinetic Assay for Cross-Species Specific Bispecific Single Chain Molecules

[0764] The assay is based on the ECL-ELISA technology using ruthenium labelled detection on carbon plates measured on a Sektor Imager device (MSD). In a first step, carbon plates (MSD High Bind Plate 96 well Cat: L15×B-3) were coated with 5 μl/well at 50 ng/ml of the purified 1-27 CD3-Fc described in Example 18.1. The plate was then dried overnight at 25° C. Subsequently plates were blocked with 5% BSA (Paesel & Lorei #100568) in PBS at 150 μl/well for 1 h at 25° C. in an incubator while shaking (700 rpm). In the next step plates were washed three times with 0.05% Tween in PBS. A standard curve in 50% macaque serum in PBS was generated by serial 1:4 dilution starting at 100 ng/ml of the respective cross-species specific bispecific single chain molecule to be detected in the assay. Quality control (QC) samples were prepared in 50% macaque serum in PBS ranging from 1 ng/ml to 50 ng/ml of the respective cross-species specific bispecific single chain molecule dependent on the expected sample serum concentrations. Standard, QC or unknown samples were transferred to the carbon plates at 10 μl/well and incubated for 90 min at 25° C. in the incubator while shaking (700 rpm). Subsequently plates were washed three times with 0.05% Tween in PBS. For detection 25 μl/well of penta-His-Biotin antibody (Qiagen, 200 μg/ml in 0.05% Tween in PBS) was added and incubated for 1 h at 25° C. in an incubator while shaking (700 rpm). In a second detection step 25 μl/well Streptavidin-SulfoTag solution (MSD; Cat: R32AD-1; Lot: W0010903) was added and incubated for 1 h at 25° C. in an incubator while shaking (700 rpm). Subsequently plates were washed three times with 0.05% Tween in PBS. Finally 150 μl/well MSD Reading Buffer (MSD, Cat: R9ZC-1) was added and plates were read in the Sektor Imager device.

[0765] FIGS. 34 and 35 demonstrate the feasibility of detection of cross-species specific bispecific single chain molecules in serum samples of macaque monkeys for cross-species specific bispecific single chain molecules. The cross-species specific anti-CD3 single chain antibodies contained in the bispecific single chain molecules enable therefore via their specific binding properties a highly sensitive generic assay for detection of the cross-species specific bispecific single chain molecules. The assay set out above can be used in the context of formal toxicological studies that are needed for drug development and can be easily adapted for measurement of patient samples in connection with the clinical application of cross-species specific bispecific single chain molecules.

19. Generation of Recombinant Transmembrane Fusion Proteins of the N-Terminal Amino Acids 1-27 of CD3 Epsilon from Different Non-Chimpanzee Primates Fused to EpCAM from Cynomolgus Monkey (1-27 CD3-EpCAM).

### 19.1 Cloning and Expression of 1-27 CD3-EpCAM

[0766] CD3 epsilon was isolated from different non-chimpanzee primates (marmoset, tamarin, squirrel monkey) and swine. The coding sequences of the 1-27 N-terminal amino acids of CD3 epsilon chain of the mature human, common marmoset (Callithrix jacchus), cottontop tamarin (Saguinus oedipus), common squirrel monkey (Saimiri sciureus) and domestic swine (Sus scrofa; used as negative control) fused to the N-terminus of Flag tagged cynomolgus EpCAM were obtained by gene synthesis according to standard protocols (cDNA sequence and amino acid sequence of the recombinant fusion proteins are listed under SEQ ID NOs 231 to 240). The gene synthesis fragments were designed as to contain first a BsrGI site to allow for fusion in correct reading frame with the coding sequence of a 19 amino acid immunoglobulin leader peptide already present in the target expression vector, which was followed in frame by the coding sequence of the N-terminal 1-27 amino acids of the extracellular portion of the mature CD3 epsilon chains, which was followed in frame by the coding sequence of a Flag tag and followed in frame by the coding sequence of the mature cynomolgus EpCAM transmembrane protein. The gene synthesis fragments were also designed to introduce a restriction site at the end of the cDNA coding for the fusion protein. The introduced restriction sites BsrGI at the 5′ end and SaII at the 3′ end, were utilized in the following cloning procedures. The gene synthesis fragments were then cloned via BsrGI and SaII into a derivative of the plasmid designated pEF-DHFR (pEF-DHFR is described in Raum et al. Cancer Immunol Immunother 50 (2001) 141-150), which already contains the coding sequence of the 19 amino acid immunoglobulin leader peptide following standard protocols. Sequence verified plasmids were used to transfect DHFR deficient CHO cells for eukaryotic expression of the construct. Eukaryotic protein expression in DHFR deficient CHO cells was performed as described by Kaufmann R. J. (1990) Methods Enzymol. 185, 537-566. Gene amplification of the construct was induced by increasing concentrations of methotrexate (MTX) to a final concentration of up to 20 nM MTX.

[0767] Transfectants were tested for cell surface expression of the recombinant transmembrane protein via an FACS assay according to standard protocols. For that purpose a number of 2.5×10⁵ cells were incubated with 50 μl of the anti-Flag M2 antibody (Sigma-Aldrich Chemie GmbH, Taufkirchen, Germany) at 5 μg/ml in PBS with 2% FCS. Bound antibody was detected with an R-Phycoerythrin-conjugated affinity purified F(ab′)2 fragment, goat anti-mouse IgG, Fc-gamma fragment specific 1:100 in PBS with 2% FCS (Jackson ImmunoResearch Europe Ltd., Newmarket, Suffolk, UK). Flow cytometry was performed on a FACS-Calibur apparatus, the CellQuest software was used to acquire and analyze the data (Becton Dickinson biosciences, Heidelberg). FACS staining and measuring of the fluorescence intensity were performed as described in Current Protocols in Immunology (Coligan, Kruisbeek, Margulies, Shevach and Strober, Wiley-Interscience, 2002).

[0768] Expression of the Flag tagged recombinant transmembrane fusion proteins consisting of cynomolgus EpCAM and the 1-27 N-terminal amino acids of the human, marmoset, tamarin, squirrel monkey and swine CD3 epsilon chain respectively on transfected cells is clearly detectable (FIG. 36).

### 19.2 Cloning and Expression of the Cross-Species Specific Anti-CD3 Single Chain Antibody I2C HL in Form of an IgG1 Antibody

[0769] In order to provide improved means of detection of binding of the cross-species specific single chain anti-CD3 antibody the I2C VH-VL specificity is converted into an IgG1 antibody with murine IgG1 and murine kappa constant regions. cDNA sequences coding for the heavy chain of the IgG antibody were obtained by gene synthesis according to standard protocols. The gene synthesis fragments were designed as to contain first a Kozak site to allow for eukaryotic expression of the construct, which is followed by an 19 amino acid immunoglobulin leader peptide, which is followed in frame by the coding sequence of the heavy chain variable region or light chain variable region, followed in frame by the coding sequence of the heavy chain constant region of murine IgG1 as published in GenBank (Accession number AB097849) or the coding sequence of the murine kappa light chain constant region as published in GenBank (Accession number D14630), respectively.

[0770] Restriction sites were introduced at the beginning and the end of the cDNA coding for the fusion protein. Restriction sites EcoRI at the 5′ end and SaII at the 3′ end were used for the following cloning procedures. The gene synthesis fragments were cloned via EcoRI and SaII into a plasmid designated pEF-DHFR (pEF-DHFR is described in Raum et al. Cancer Immunol Immunother 50 (2001) 141-150) for the heavy chain construct and pEFADA (pEFADA is described in Raum et al. loc cit.) for the light chain construct according to standard protocols. Sequence verified plasmids were used for co-transfection of respective light and heavy chain constructs into DHFR deficient CHO cells for eukaryotic expression of the construct. Eukaryotic protein expression in DHFR deficient CHO cells was performed as described by Kaufmann R. J. (1990) loc cit. Gene amplification of the constructs was induced by increasing concentrations of methotrexate (MTX) to a final concentration of up to 20 nM MTX and deoxycoformycin (dCF) to a final concentration of up to 300 nM dCF. After two passages of stationary culture cell culture supernatant was collected and used in the subsequent experiment.

### 19.3 Binding of the Cross-Species Specific Anti-CD3 Single Chain Antibody I2C HL in Form of an IgG1 Antibody to 1-27 CD3-EpCAM

[0771] Binding of the generated I2C IgG1 construct to the 1-27 N-terminal amino acids of the human, marmoset, tamarin and squirrel monkey CD3 epsilon chains respectively fused to cynomolgus Ep-CAM as described in Example 19.1 was tested in a FACS assay according to standard protocols. For that purpose a number of 2.5×10⁵ cells were incubated with 50 μl of cell culture supernatant containing the I2C IgG1 construct as described in Example 19.2. The binding of the antibody was detected with an R-Phycoerythrin-conjugated affinity purified F(ab′)2 fragment, goat anti-mouse IgG, Fc-gamma fragment specific, diluted 1:100 in PBS with 2% FCS (Jackson ImmunoResearch Europe Ltd., Newmarket, Suffolk, UK). Flow cytometry was performed on a FACS-Calibur apparatus, the CellQuest software was used to acquire and analyze the data (Becton Dickinson biosciences, Heidelberg). FACS staining and measuring of the fluorescence intensity were performed as described in Current Protocols in Immunology (Coligan, Kruisbeek, Margulies, Shevach and Strober, Wiley-Interscience, 2002).

[0772] As shown in FIG. 37 binding of the I2C IgG1 construct to the transfectants expressing the recombinant transmembrane fusion proteins consisting of the 1-27 N-terminal amino acids of CD3 epsilon of human, marmoset, tamarin or squirrel monkey fused to cynomolgus EpCAM as compared to the negative control consisting of the 1-27 N-terminal amino acids of CD3 epsilon of swine fused to cynomolgus EpCAM was observed. Thus multi-primate cross-species specificity of I2C was demonstrated. Signals obtained with the anti Flag M2 antibody and the I2C IgG1 construct were comparable, indicating a strong binding activity of the cross-species specific specificity I2C to the N-terminal amino acids 1-27 of CD3 epsilon.

20. Binding of the Cross-Species Specific Anti-CD3 Binding Molecule I2C to the Human CD3 Epsilon Chain with and without N-Terminal His6 Tag

[0773] A chimeric IgG1 antibody with the binding specificity I2C as described in Example 19.2 specific for CD3 epsilon was tested for binding to human CD3 epsilon with and without N-terminal His6 tag. Binding of the antibody to the EL4 cell lines transfected with His6-human CD3 epsilon as described in Example 6.1 and wild-type human CD3 epsilon as described in Example 5.1 respectively was tested by a FACS assay according to standard protocols. 2.5×10⁵ cells of the transfectants were incubated with 50 μl of cell culture supernatant containing the I2C IgG1 construct or 50 μl of the respective control antibodies at 5 μg/ml in PBS with 2% FCS. As negative control an appropriate isotype control and as positive control for expression of the constructs the CD3 specific antibody UCHT-1 were used respectively. Detection of the His6 tag was performed with the penta His antibody (Qiagen). The binding of the antibodies was detected with a R-Phycoerythrin-conjugated affinity purified F(ab′)2 fragment, goat anti-mouse IgG, Fc-gamma fragment specific, diluted 1:100 in PBS with 2% FCS (Jackson ImmunoResearch Europe Ltd., Newmarket, Suffolk, UK). Flow cytometry was performed on a FACS-Calibur apparatus, the CellQuest software was used to acquire and analyze the data (Becton Dickinson biosciences, Heidelberg). FACS staining and measuring of the fluorescence intensity were performed as described in Current Protocols in Immunology (Coligan, Kruisbeek, Margulies, Shevach and Strober, Wiley-Interscience, 2002).

[0774] Comparable binding of the anti-human CD3 antibody UCHT-1 to both transfectants demonstrates approximately equal levels of expression of the constructs. The binding of the penta His antibody confirmed the presence of the His6 tag on the His6-human CD3 construct but not on the wild-type construct.

[0775] Compared to the EL4 cell line transfected with wild-type human CD3 epsilon a clear loss of binding of the I2C IgG1 construct to human-CD3 epsilon with an N-terminal His6 tag was detected. These results show that a free N-terminus of CD3 epsilon is essential for binding of the cross-species specific anti-CD3 binding specificity I2C to the human CD3 epsilon chain (FIG. 28).

### 21. Generation of CD33 and CD3 Cross-Species Specific Bispecific Single Chain Molecules

### 21.1 Generation of CD33 and CD3 Cross-Species Specific Bispecific Single Chain Molecules

[0776] Generally, bispecific single chain antibody molecules, each comprising a domain with a binding specificity cross-species specific for human and macaque CD3epsilon as well as a domain with a binding specificity cross-species specific for human and macaque CD33, were designed as set out in the following Table 6:

TABLE 6
Formats of anti-CD3 and anti-CD33 cross-species specific
bispecific single chain antibody molecules

| SEQ ID (nucl/prot) | Formats of protein constructs (N → C) |
|---|---|
| 316/315 | I2CHL × AF5HL |
| 314/313 | F12QHL × AF5HL |
| 312/311 | H2CHL × AF5HL |

[0777] The aforementioned constructs containing the variable light-chain (L) and variable heavy-chain (H) domains cross-species specific for human and macaque CD33 and the CD3 specific VH and VL combinations cross-species specific for human and macaque CD3 were obtained by gene synthesis. The gene synthesis fragments were designed in analogy to the procedure described in example 9 for the MCSP and CD3 cross-species specific single chain molecules. A clone with sequence-verified nucleotide sequence was transfected into DHFR deficient CHO cells for eukaryotic expression of the construct. Eukaryotic protein expression in DHFR deficient CHO cells was performed as also described in example 9 for the MCSP and CD3 cross-species specific single chain molecules and used in the subsequent experiments.

### 21.2 Flow Cytometric Binding Analysis of the CD33 and CD3 Cross-Species Specific Bispecific Antibodies

[0778] In order to test the functionality of the cross-species specific bispecific antibody constructs regarding the capability to bind to human and macaque CD33 and CD3, respectively, a FACS analysis is performed similar to the analysis described for the analysis of the MCSP and CD3 cross-species specific bispecific antibodies in example 10 using CHO cells expressing the human or macyque CD33 extracellular domains (see examples 16.1 and 16.2).

[0779] The bispecific binding of the single chain molecules listed above, which were cross-species specific for CD33 and cross-species specific for human and non-chimpanzee primate CD3 was clearly detectable as shown in FIG. 41. In the FACS analysis all constructs showed binding to CD3 and CD33 as compared to the respective negative controls. Cross-species specificity of the bispecific antibodies to human and macaque CD3 and CD33 antigens was demonstrated.

### 21.3. Bioactivity of CD33 and CD3 Cross-Species Specific Bispecific Single Chain Antibodies

[0780] Bioactivity of the generated bispecific single chain antibodies was analyzed by chromium 51 (⁵¹Cr) release in vitro cytotoxicity assays using the CD33 positive cell lines described in Examples 16.1 and 16.2. As effector cells stimulated human CD4/CD56 depleted PBMC or the macaque T cell line 4119LnPx were used as specified in the respective figures. The cytotoxicity assays were performed similar to the procedure described for the bioactivity analysis of the MCSP and CD3 cross-species specific bispecific antibodies in example 11 using CHO cells expressing the human or macaque CD33 extracellular domains (see example 16.1 and 16.2) as target cells.

[0781] As shown in FIG. 42, all of the generated cross-species specific bispecific single chain antibody constructs demonstrate cytotoxic activity against human CD33 positive target cells elicited by stimulated human CD4/CD56 depleted PBMC and against macaque CD33 positive target cells elicited by the macaque T cell line 4119LnPx.

22. Redistribution of Circulating Chimpanzee T Cells Upon Exposure to a Conventional Bispecific CD3 Binding Molecule Directed at a Target Molecule which is Absent from Circulating Blood Cells

[0782] A single male chimpanzee was subjected to dose escalation with intravenous single-chain EpCAM/CD3-bispecific antibody construct (Schlereth (2005) Cancer Res 65: 2882). Like in the conventional single-chain CD19/CD3-bispecific antibody construct (Loffler (2000, Blood, Volume 95, Number 6) or WO 99/54440), the CD3 arm of said EpCAM/CD3-construct is also directed against a conventional context dependent epitope of human and chimpanzee CD3. At day 0, the animal received 50 ml PBS/5% HSA without test material, followed by 50 ml PBS/5% HSA plus single-chain EpCAM/CD3-bispecific antibody construct at 1.6, 2.0, 3.0 and 4.5 μg/kg on days 7, 14, 21 and 28, respectively. The infusion period was 2 hours per administration. For each weekly infusion the chimpanzee was sedated with 2-3 mg/kg Telazol intramuscularly, intubated and placed on isoflurane/02 anesthesia with stable mean blood pressures. A second intravenous catheter was placed in an opposite limb to collect (heparinized) whole blood samples at the time points indicated in FIG. 43 for FACS analysis of circulating blood cells. After standard erythrocyte lysis, T cells were stained with a FITC-labeled antibody reacting with chimpanzee CD2 (Becton Dickinson) and the percentage of T cells per total lymphocytes determined by flowcytometry. As shown in FIG. 43, every administration of single-chain EpCAM/CD3-bispecific antibody construct induced a rapid drop of circulating T cells as observed with single-chain CD19/CD3-bispecific antibody construct in B-NHL patients, who had essentially no circulating target B (lymphoma) cells. As there are no EpCAM-positive target cells in the circulating blood of humans and chimpanzees, the drop of circulating T cells upon exposure to the single-chain EpCAM/CD3-bispecific antibody construct can be attributed solely to a signal, which the T cells receive through pure interaction of the CD3 arm of the construct with a conventional context dependent CD3 epitope in the absence of any target cell mediated crosslinking. Like the redistribution of T cells induced through their exposure to single-chain CD19/CD3-bispecific antibody construct in B-NHL patients, who had essentially no circulating target B (lymphoma) cells, the T cell redistribution in the chimpanzee upon exposure to the single-chain EpCAM/CD3-bispecific antibody construct can be explained by a conformational change of CD3 following the binding event to a context dependent CD3 epitope further resulting in the transient increase of T cell adhesiveness to blood vessel endothelium (see Example 13). This finding confirms, that conventional CD3 binding molecules directed to context dependent CD3 epitopes—solely through this interaction—can lead to a redistribution pattern of peripheral blood T cells, which is associated with the risk of CNS adverse events in humans as describe in Example 13.

23. Specific Binding of scFv Clones to the N-Terminus of Human CD3 Epsilon
23.1 Bacterial Expression of scFv Constructs in E. coli XL1 Blue

[0783] As previously mentioned, E. coli XL1 Blue transformed with pComb3H5Bhis/Flag containing a VL- and VH-segment produce soluble scFv in sufficient amounts after excision of the gene 11 fragment and induction with 1 mM IPTG. The scFv-chain is exported into the periplasma where it folds into a functional conformation.

[0784] The following scFv clones were chosen for this experiment:
[0785] i) ScFvs 4-10, 3-106, 3-114, 3-148, 4-48, 3-190 and 3-271 as described in WO 2004/106380.
[0786] ii) ScFvs from the human anti-CD3epsilon binding clones H2C, F12Q and I2C as described herein.

[0787] For periplasmic preparations, bacterial cells transformed with the respective scFv containing plasmids allowing for periplasmic expression were grown in SB-medium supplemented with 20 mM MgCl₂ and carbenicillin 50 μg/ml and redissolved in PBS after harvesting. By four rounds of freezing at −70° C. and thawing at 37° C., the outer membrane of the bacteria was destroyed by osmotic shock and the soluble periplasmic proteins including the scFvs were released into the supernatant. After elimination of intact cells and cell-debris by centrifugation, the supernatant containing the human anti-human CD3-scFvs was collected and used for further examination. These crude supernatants containing scFv will be further termed periplasmic preparations (PPP).

23.2 Binding of scFvs to Human CD3 Epsilon (Aa 1-27)-Fc Fusion Protein

[0788] ELISA experiments were carried out by coating the human CD3 epsilon (aa 1-27)-Fc fusion protein to the wells of 96 well plastic plates (Nunc, maxisorb) typically at 4° C. over night. The antigen coating solution was then removed, wells washed once with PBS/0.05% Tween 20 and subsequently blocked with PBS/3% BSA for at least one hour. After removal of the blocking solution, PPPs and control solutions were added to the wells and incubated for typically one hour at room temperature. The wells were then washed three times with PBS/0.05% Tween 20. Detection of scFvs bound to immobilized antigen was carried out using a Biotin-labeled anti FLAG-tag antibody (M2 anti Flag-Bio, Sigma, typically at a final concentration of 1 μg/ml PBS) and detected with a peroxidase-labeled Streptavidine (Dianova, 1 μg/ml PBS). The signal was developed by adding ABTS substrate solution and measured at a wavelength of 405 nm. Unspecific binding of the test-samples to the blocking agent and/or the human IgG1 portion of the human CD3 epsilon (aa 1-27)-Fc fusion protein was examined by carrying out the identical assay with the identical reagents and identical timing on ELISA plates which were coated with human IgG1 (Sigma). PBS was used as a negative control.

[0789] As shown in FIG. 44, scFvs H2C, F12Q and I2C show strong binding signals on human CD3 epsilon (aa 1-27)-Fc fusion protein. The human scFvs 3-106, 3-114, 3-148, 3-190, 3-271, 4-10 and 4-48 (as described in WO 2004/106380) do not show any significant binding above negative control level.

[0790] To exclude the possibility that the positive binding of scFvs H2C, F12Q and I2C to wells coated with human CD3 epsilon (aa 1-27)-Fc fusion protein might be due to binding to BSA (used as a blocking agent) and/or the human IgG1 Fc-gamma-portion of the human CD3 epsilon (aa 1-27)-Fc fusion protein, a second ELISA experiment was performed in parallel. In this second ELISA experiment, all parameters were identical to those in the first ELISA experiment, except that in the second ELISA experiment human IgG1 (Sigma) was coated instead of human CD3 epsilon (aa 1-27)-Fc fusion protein. As shown in FIG. 45, none of the scFvs tested showed any significant binding to BSA and/or human IgG1 above background level.

[0791] Taken together, these results allow the conclusion that conventional CD3 binding molecules recognizing a context-dependent epitope of CD3 epsilon (e.g. as disclosed in WO 2004/106380) do not bind specifically to the human CD3 epsilon (aa 1-27)-region, whereas the scFvs H2C, F12Q and I2C binding a context-independent epitope of CD3 epsilon clearly show specific binding to the N-terminal 27 amino acids of human CD3 epsilon.

### 24. Generation and Characterization of PSCA and CD3 Cross-Species Specific Bispecific Single Chain Antibody Molecules

### 24.1 Generation of CHO Cells Expressing Human PSCA

[0792] The coding sequence of human PSCA as published in GenBank (Accession number NM_005672) was obtained by gene synthesis according to standard protocols. The gene synthesis fragment was designed as to contain first a Kozak site for eukaryotic expression of the construct, followed by a 19 amino acid immunoglobulin leader peptide, followed in frame by the coding sequence of a FLAG tag, followed in frame by the coding sequence of the mature human PSCA protein and a stop codon (the corresponding sequences of the construct are listed under SEQ ID NOs. 443 and 444). The gene synthesis fragment was also designed as to introduce restriction sites at the beginning and at the end of the fragment. The introduced restriction sites, EcoRI at the 5′ end and SaII at the 3′ end, were utilised in the following cloning procedures. The gene synthesis fragment was cloned via EcoRI and SaII into a plasmid designated pEF-DHFR (pEF-DHFR is described in Raum et al. Cancer Immunol Immunother 50 (2001) 141-150) following standard protocols. The aforementioned procedures were carried out according to standard protocols (Sambrook, Molecular Cloning; A Laboratory Manual, 3rd edition, Cold Spring Harbour Laboratory Press, Cold Spring Harbour, New York (2001)). A clone with sequence-verified nucleotide sequence was transfected into DHFR deficient CHO cells for eukaryotic expression of the construct. Eukaryotic protein expression in DHFR deficient CHO cells was performed as described by Kaufmann R. J. (1990) Methods Enzymol. 185, 537-566. Gene amplification of the construct was induced by increasing concentrations of methotrexate (MTX) to a final concentration of up to 20 nM MTX.

### 24.2 Generation of CHO Cells Expressing Macaque PSCA

[0793] The cDNA sequence of macaque PSCA was obtained by a PCR on cDNA from macaque monkey (cynomolgus) prostate prepared according to standard protocols. The following reaction conditions: 1 cycle at 94° C. for 2 minutes followed by 40 cycles with 94° C. for 1 minute, 55° C. for 1 minute and 72° C. for 1 minute followed by a terminal cycle of 72° C. for 3 minutes and the following primers were used:

forward primer:
(SEQ ID NO. 447)
5′-CACCACAGCCCACCAGTGACC-3′
reverse primer:
(SEQ ID NO. 448)
5′-GAGGCCTGGGGCACCACACCC-3′

[0794] The PCR reactions were performed under addition of PCR grade betain to a final concentration of 1 M. This PCR generated a DNA fragment, which was isolated and sequenced according to standard protocols using the PCR primers, and thereby provided the cDNA sequence coding macaque PSCA. To generate a construct for expression of macaque PSCA a cDNA fragment was obtained by gene synthesis according to standard protocols (the corresponding sequences are listed under SEQ ID NOs: 445 and 446). The gene synthesis fragment was designed as to contain first a Kozak site for eukaryotic expression of the construct, followed by a 19 amino acid immunoglobulin leader peptide, followed in frame by the coding sequence of a FLAG tag, followed in frame by the coding sequence of the mature macaque PSCA protein and a stop codon. The gene synthesis fragment was also designed as to introduce restriction sites at the beginning and at the end of the fragment. The introduced restriction sites, EcoRI at the 5′ end and SaII at the 3′ end, were utilised in the following cloning procedures. The gene synthesis fragment was cloned via EcoRI and SaII into a plasmid designated pEF-DHFR (pEF-DHFR is described in Raum et al. Cancer Immunol Immunother 50 (2001) 141-150) following standard protocols. The aforementioned procedures were carried out according to standard protocols (Sambrook, Molecular Cloning; A Laboratory Manual, 3rd edition, Cold Spring Harbour Laboratory Press, Cold Spring Harbour, New York (2001)). A clone with sequence-verified nucleotide sequence was transfected into DHFR deficient CHO cells for eukaryotic expression of the construct. Eukaryotic protein expression in DHFR deficient CHO cells was performed as described by Kaufmann R. J. (1990) Methods Enzymol. 185, 537-566. Gene amplification of the construct was induced by increasing concentrations of methotrexate (MTX) to a final concentration of up to 20 nM MTX.

### 24.3 Generation of PSCA and CD3 Cross-Species Specific Bispecific Single Chain Antibody Molecules

### Cloning of Cross-Species Specific PSCA×CD3 Bispecific Single Chain Antibody Molecules

[0795] Generally, bispecific single chain antibody molecules, each comprising a domain with a binding specificity cross-species specific for human and non-chimpanzee primate CD3 epsilon as well as a domain with a binding specificity cross-species specific for human and non-chimpanzee primate PSCA, were designed as set out in the following Table 7:

TABLE 7
Formats of anti-CD3 and anti-PSCA cross-species specific
bispecific single chain antibody molecules

| SEQ ID NO. (nucl/prot) | Formats of protein constructs (N → C) |
|---|---|
| 390/389 | PSCA1HL × I2CHL |
| 422/421 | PSCA3HL × I2CHL |
| 440/439 | PSCA4HL × I2CHL |
| 392/391 | PSCA1LH × I2CHL |
| 406/405 | PSCA2LH × I2CHL |
| 424/423 | PSCA3LH × I2CHL |
| 442/441 | PSCA4LH × I2CHL |
| 1227/1226 | PC16E12HL × I2CHL |
| 1199/1198 | PC32D5HL × I2CHL |
| 1185/1184 | PC32B8HL × I2CHL |
| 1241/1240 | PC08F4HL × I2CHL |
| 1213/1212 | PC17D10HL × I2CHL |
| 1269/1268 | PC17H10HL × I2CHL |
| 1255/1254 | PC16F5HL × I2CHL |

[0796] The aforementioned constructs containing the variable light-chain (L) and variable heavy-chain (H) domains cross-species specific for human and macaque PSCA and the CD3 specific VH and VL combinations cross-species specific for human and macaque CD3 were obtained by gene synthesis. The gene synthesis fragments were designed and eukaryotic protein expression was performed in analogy to the procedure described in example 9 for the MCSP and CD3 cross-species specific single chain molecules.

### 24.4 Expression and Purification of the PSCA×CD3 Bispecific Single Chain Antibody Molecules

[0797] The bispecific single chain antibody molecules were expressed in Chinese hamster ovary cells (CHO) or HEK293 cells as described herein above for the MCSP×CD3 bispecific single chan antibodies.

[0798] The isolation and analysis of the expressed bispecific single chan antibodies has also been described herein above in Example 9.

### 24.5 Flow Cytometric Binding Analysis of the PSCA and CD3 Cross-Species Specific Bispecific Antibodies

[0799] In order to test the functionality of the cross-species specific bispecific antibody constructs regarding the capability to bind to human and macaque PSCA and CD3, respectively, a FACS analysis was performed. For this purpose CHO cells transfected with human PSCA as described in Example 24.1 and the human CD3 positive T cell leukemia cell line HPB-ALL (DSMZ, Braunschweig, ACC483) were used to test the binding to human antigens. The binding reactivity to macaque antigens was tested by using the generated macaque PSCA transfectant described in Example 24.2 and a macaque T cell line 4119LnPx (kindly provided by Prof Fickenscher, Hygiene Institute, Virology, Erlangen-Nuernberg; published in Knappe A, et al., and Fickenscher H., Blood 2000, 95, 3256-61). 200.000 cells of the respective cell lines were incubated for 30 min on ice with 50 μl of cell culture supernatant of transfected cells expressing the cross-species specific bispecific antibody constructs. The cells were washed twice in PBS with 2% FCS and binding of the construct was detected with a murine Penta His antibody (Qiagen; diluted 1:20 in 50 μl PBS with 2% FCS). After washing, bound anti His antibodies were detected with an Fc gamma-specific antibody (Dianova) conjugated to phycoerythrin, diluted 1:100 in PBS with 2% FCS. Supernatant of untransfected cells was used as a negative control.

[0800] Flow cytometry was performed on a FACS-Calibur apparatus, the CellQuest software was used to acquire and analyze the data (Becton Dickinson biosciences, Heidelberg). FACS staining and measuring of the fluorescence intensity were performed as described in Current Protocols in Immunology (Coligan, Kruisbeek, Margulies, Shevach and Strober, Wiley-Interscience, 2002).

[0801] The bispecific binding of the single chain molecules listed above, which are cross-species specific for PSCA and CD3 was clearly detectable as shown in FIGS. 46 and 48. In the FACS analysis all constructs showed binding to CD3 and PSCA compared to the negative control. Cross-species specificity of the bispecific antibodies to human and macaque CD3 and PSCA antigens, respectively, was demonstrated.

### 24.6 Bioactivity of PSCA and CD3 Cross-Species Specific Bispecific Single Chain Antibodies

[0802] Bioactivity of the generated bispecific single chain antibodies was analyzed by chromium 51 (⁵¹Cr) release in vitro cytotoxicity assays using the CHO cells transfected with human PSCA described in Example 24.1 and the CHO cells transfected with macaque PSCA described in Example 24.2. As effector cells stimulated human CD4/CD56 depleted PBMC or the macaque T cell line 4119LnPx were used, respectively.

[0803] The generation of stimulated human PBMC was described herein above in Example 11.

[0804] Target cells were prepared and the assay was performed in analogy to the procedure described for the MCSP×CD3 bispecific single chain antibodies in example 11.

[0805] As shown in FIGS. 47 and 49 all of the generated cross-species specific bispecific single chain antibody constructs demonstrated cytotoxic activity against human PSCA positive target cells elicited by stimulated human CD4/CD56 depleted PBMC and macaque PSCA positive target cells elicited by the macaque T cell line 4119LnPx.

### 24.7 Bispecific Single Chain Antibody Constructs Directed Against Human and Non-Chimpanzee Primate CD3 and PSCA

[0806] The human antibody germline VH sequence VH1 1-f (http://vbase.mrccpe.cam.ac.uk/) is chosen as framework context for CDRH1 (SEQ ID NO. 414), CDRH2 (SEQ ID NO. 415) and CDRH3 (SEQ ID NO. 416). Likewise the same human antibody germline VH sequence is chosen as framework context for CDRH1 (SEQ ID NO. 400), CDRH2 (SEQ ID NO. 401) and CDRH3 (SEQ ID NO. 402). For each human VH several degenerated oligonucleotides have to be synthesized that overlap in a terminal stretch of approximately 15-20 nucleotides. To this end every second primer is an antisense primer. For VH1 1-f the following set of oligonucleotides is used:

5′ P3-VH-A-XhoI
(SEQ ID NO. 449)
CCT GAT CTC GAG AGC GGC SCA GAS STG RAA AAG
CCA GGC GCC ACG GTG AAG ATT
5′ P3-VH-B
(SEQ ID NO. 450)
GGC GCC ACG GTG AAG ATT TCC TGC AAG SYC AGC
GGC WAC ACG TTC ACC GGC TAC TAC ATC CAC TGG
GTG
3′ P3-VH-C
(SEQ ID NO. 451)
GTA GGA GGT GAA GCC GTT GTT GGG GTC CAC TCT
GCC SAT CCA TTC CAG GCY CTT CCC GKG GGM CTG
TTK CAC CCA GTG GAT GTA GTA
5′ P3-VH-D
(SEQ ID NO. 452)
AAC GGC TTC ACC TCC TAC AAC CAG AAG TTC AAG
GGC ARG GYC AYA MTK ACC GYG GAC AMG AGC ACC
RRC ACC GCC TAC ATG GAA CTG
3′ P3-VH-E
(SEQ ID NO. 453)
GCT GTC GAA GAA GTT GCC CRC GCA ATA GTA CAC
GGC GGT GTC CTC GCT GSK CAG GCT KCT CAG TTC
CAT GTA GGC GGT
3′ P3-VH-F-BstEII
(SEQ ID NO. 454)
CAC GTC GGT GAC CGT GGT TCC CTG GCC CCA GCT
GTC GAA GAA GTT GCC

[0807] As another set of oligonucleotides for VH1 1-f the following primers are used:

5′-PSCA2VH-A-XHO1
(SEQ ID NO. 455)
CAG GTG CTCGAG YCA GGC GCC GAA STG RWG AAG CCT
GGC GCC MCA GTG AAG MTA TCC TGC AAG GYC AGC GGC
TAC ACC TTC ACC AAC
3′-PSCA2VH-B
(SEQ ID NO. 456)
GCT GTC GCT GGG GTC GAT CCT GCC YAT CCA TTC CAG
GCC CYT GCC GGG CSY CTG TTK CAC CCA GTT CAG CCA
GTA GTT GGT GAA GGT GTA GCC
5′-PSCA2VH-C
(SEQ ID NO. 457)
AGG ATC GAC CCC AGC GAC AGC GAG ATC CAC TAC GAC
CAG AAG TTC AAG GAC ARA GYC ACC MTA ACC GYG GAC
AMG AGC ACC RRC ACC GCC TAC
3′-PSCA2VH-D
(SEQ ID NO. 458)
GGC CAG GGC GCA ATA GTA CAC GGC GGT GTC CTC GCT
TST CAG GCT GGA CAG CTS SAT GTA GGC GGT GYY GGT
GCT C
3′-PSCA2VH-E-BSTE2
(SEQ ID NO. 459)
AGA CAC GGT GAC CGT GGT GCC CTG GCC CCA GTA GGC
CAT GGC GTA GAT GCC GGT CAG GGC GCA ATA GTA CAC

[0808] Each of these primer sets spans over the whole corresponding VH sequence. Within each set primers are mixed in equal amounts (e.g. 1 μl of each primer (primer stocks 20 to 100 μM) to a 20 μl PCR reaction) and added to a PCR mix consisting of PCR buffer, nucleotides and Taq polymerase. This mix is incubated at 94° C. for 3 minutes, 65° C. for 1 minute, 62° C. for 1 minute, 59° C. for 1 minute, 56° C. for 1 minute, 52° C. for 1 minute, 50° C. for 1 minute and at 72° C. for 10 minutes in a PCR cycler. Subsequently the product is run in an agarose gel electrophoresis and the product of a size from 200 to 400 isolated from the gel according to standard methods.

[0809] Each VH PCR product is then used as a template for a standard PCR reaction using primers that incorporate N-terminal and C-terminal suitable cloning restriction sites. The DNA fragment of the correct size (for a VH approximately 350 nucleotides) is isolated by agarose gel electrophoresis according to standard methods. In this way sufficient VH DNA fragment is amplified.

[0810] The human antibody germline VL sequence Vkll A1 (http://vbase.mrccpe.cam.ac.uk/) is chosen as framework context for CDRL1 (SEQ ID NO. 409), CDRL2 (SEQ ID NO. 410) and CDRL3 (SEQ ID NO. 411). Likewise human antibody germline VL sequence Vkll A19 (http://vbase.mrc-cpe.cam.ac.uk/) is chosen as framework context for CDRL1 (SEQ ID NO. 395), CDRL2 (SEQ ID NO. 396) and CDRL3 (SEQ ID NO. 397). For each human VL several degenerated oligonucleotides have to be synthesized that overlap in a terminal stretch of approximately 15-20 nucleotides. To this end every second primer is an antisense primer. Restriction sites needed for later cloning within the oligonucleotides are deleted. For Vkll A1 the following oligonucleotides are used:

5′ P3-VL-A-SacI
(SEQ ID NO. 460)
CCT GTA GAG CTC GTC ATG ACC CAG TCC CCC CTG TCC
CTG MSC GTG ACC MTC GGC CAG CCA GCC AGC ATC
3′ P3-VL-B
(SEQ ID NO. 461)
CCA GTT CAG GTA GGT CTT GCC GTC GCT GTC CAG CAG
GGA CTG GCT GGA CTT GCA AGA GAT GCT GGC TGG CTG
GCC
5′ P3-VL-C
(SEQ ID NO. 462)
AAG ACC TAC CTG AAC TGG YTS CWG CAG AGG CCA GGC
CAG AGC CCC ARG AGG CTG ATC TAC CTG GTG TCC ACC
CTG
3′ P3-VL-D
(SEQ ID NO. 463)
GGT GAA GTC GGT GCC GGA GCC GCT GCC GGA GAA TCT
GTC TGG CAC GCC GCT GTC CAG GGT GGA CAC CAG GTA
5′ P3-VL-E
(SEQ ID NO. 464)
TCC GGC ACC GAC TTC ACC CTG AAG ATC AGC AGG GTG
GAG GCC GAG GAC STG GGC GTG TAC TAC TGC TGG CAG
GGC ACC
3′ P3-VL-F-BsiWI/SpeI
(SEQ ID NO. 465)
CCA GAC ACT AGT CGT ACG CTT GAT TTC CAG CTT GGT
CCC TCC GCC GAA GGT CCT TGG GAA GTG GGT GCC CTG
CCA GCA GTA

[0811] For Vkll A19 the oligonucleotides are as follows:

5′-PSCA2VL-a-SAC1
(SEQ ID NO. 466)
CAG ACA GAG CTC GTG ATG ACC CAG KCA SCT CYA
AGC STG CCA GTG ACC CCA GGC GAG YCA GYG TCC
ATC AGC TGC AGG TCC AGC
3′-PSCA2VL-b
(SEQ ID NO. 467)
CTG GGG GCT CTG GCC TGG CYT CTG CAG AWA CCA
GTA CAG GTA GGT GTT GCC GTT GCT GTG CAG CAG
GCT CTT GCT GGA CCT GCA GCT GAT G
5′-PSCA2VL-c
(SEQ ID NO. 468)
CCA GGC CAG AGC CCC CAG CTG CTG ATC TAC AGG
ATG AGC AAC CTG GCT AGC GGC GTG CCA GAC AGA
TTC AGC GGC AGC GGC TCT GGA ACC
3′-PSCA2VL-d
(SEQ ID NO. 469)
CAG GCA GTA GTA CAC GCC CAC GTC CTC GGC CTC
CAC CCT GCT GAT CYT CAG GGT GAA GKC GGT TCC
AGA GCC GCT GCC
3′-PSCA2VL-e-BsiW1-SpeI
(SEQ ID NO. 470)
GTG CTG ACT AGT CGT ACG CTT GAT TTC CAG CTT
GGT CCC TTG GCC GAA GGT GTA GGG GTA TTC CAG
GTG CTG CAG GCA GTA GTA CAC GCC

[0812] Each of these primer sets spans over the whole corresponding VL sequence.

[0813] Within each set primers are mixed in equal amounts (e.g. 1 μl of each primer (primer stocks 20 to 100 μM) to a 20 μl PCR reaction) and added to a PCR mix consisting of PCR buffer, nucleotides and Taq polymerase. This mix is incubated at 94° C. for 3 minutes, 65° C. for 1 minute, 62° C. for 1 minute, 59° C. for 1 minute, 56° C. for 1 minute, 52° C. for 1 minute, 50° C. for 1 minute and at 72° C. for 10 minutes in a PCR cycler. Subsequently the product is run in an agarose gel electrophoresis and the product of a size from 200 to 400 isolated from the gel according to standard methods.

[0814] Each VL PCR product is then used as a template for a standard PCR reaction using primers that incorporate N-terminal and C-terminal suitable cloning restriction sites. The DNA fragment of the correct size (for a VL approximately 330 nucleotides) is isolated by agarose gel electrophoresis according to standard methods. In this way sufficient VL DNA fragment is amplified.

[0815] The final VH1 1-f (P3)-based VH PCR product (i.e. the repertoire of human/humanized VH) is then combined with the final Vkll A1-based VL PCR product (i.e. the repertoire of human/humanized VL) and the final VH1 1-f (PSCA2)-based VH PCR product (i.e. the repertoire of human/humanized VH) with the final Vkll A19-based VL PCR product (i.e. the repertoire of human/humanized VL) in the phage display vector pComb3H5Bhis to form two different libraries of functional scFvs from which—after display on filamentous phage—anti-PSCA binders are selected, screened, identified and confirmed as described as follows:

[0816] 450 ng of the light chain fragments (Sacl-Spel digested) are ligated with 1400 ng of the phagemid pComb3H5Bhis (Sacl-Spel digested; large fragment). The resulting combinatorial antibody library is then transformed into 300 μl of electrocompetent Escherichia coli XL1 Blue cells by electroporation (2.5 kV, 0.2 cm gap cuvette, 25 uFD, 200 Ohm, Biorad gene-pulser) resulting in a library size of more than 10⁷ independent clones. After one hour of phenotype expression, positive transformants are selected for carbenicilline resistance encoded by the pComb3H5BHis vector in 100 ml of liquid super broth (SB)-culture over night. Cells are then harvested by centrifugation and plasmid preparation is carried out using a commercially available plasmid preparation kit (Qiagen).

[0817] 2800 ng of this plasmid-DNA containing the VL-library (Xhol-BstEII digested; large fragment) are ligated with 900 ng of the heavy chain V-fragments (Xhol-BstEII digested) and again transformed into two 300 μl aliquots of electrocompetent E. coli XL1 Blue cells by electroporation (2.5 kV, 0.2 cm gap cuvette, 25 uFD, 200 Ohm) resulting in a total VH-VL scFv (single chain variable fragment) library size of more than 10⁷ independent clones.

[0818] After phenotype expression and slow adaptation to carbenicillin, the E. coli cells containing the antibody library are transferred into SB-Carbenicillin (50 ug/mL) selection medium. The E. coli cells containing the antibody library is then infected with an infectious dose of 10¹² particles of helper phage VCSM13 resulting in the production and secretion of filamentous M13 phage, wherein phage particle contains single stranded pComb3H5BHis-DNA encoding a scFv-fragment and displayed the corresponding scFv-protein as a translational fusion to phage coat protein Ill. This pool of phages displaying the antibody library is used for the selection of antigen binding entities.

[0819] For this purpose the phage library carrying the cloned scFv-repertoire is harvested from the respective culture supernatant by PEG8000/NaCl precipitation and centrifugation. Approximately 10¹¹ to 10¹² scFv phage particles are resuspended in 0.4 ml of PBS/0.1% BSA and incubated with 10⁵ to 10⁷ PSCA transfected CHO cells (see example 24.1) for 1 hour on ice under slow agitation. These PSCA transfected CHO cells are harvested beforehand by centrifugation, washed in PBS and resuspended in PBS/1% FCS (containing Na Azide). scFv phage which do not specifically bind to the PSCA transfected CHO cells are eliminated by up to five washing steps with PBS/1% FCS (containing Na Azide). After washing, binding entities are eluted from the cells by resuspending the cells in HCl-glycine pH 2.2 (10 min incubation with subsequent vortexing) and after neutralization with 2 M Tris pH 12, the eluate is used for infection of a fresh uninfected E. coli XL1 Blue culture (OD600>0.5). The E. coli culture containing E. coli cells successfully transduced with a phagemid copy, encoding a human/humanized scFv-fragment, are again selected for carbenicillin resistance and subsequently infected with VCMS 13 helper phage to start the second round of antibody display and in vitro selection. A total of 4 to 5 rounds of selections are carried out, normally.

[0820] In order to screen for PSCA specific binders plasmid DNA corresponding to 4 and 5 rounds of panning is isolated from E. coli cultures after selection. For the production of soluble scFv-protein, VH-VL-DNA fragments are excised from the plasmids (Xhol-Spel). These fragments are cloned via the same restriction sites into the plasmid pComb3H5BFlag/His differing from the original pComb3H5BHis in that the expression construct (e.g. scFv) includes a Flag-tag (DYKDDDDK) between the scFv and the His6-tag and the additional phage proteins are deleted. After ligation, each pool (different rounds of panning) of plasmid DNA is transformed into 100 μl heat shock competent E. coli TG1 or XLI blue and plated onto carbenicillin LB-agar. Single colonies are picked into 100 μl of LB carb (50 ug/ml).

[0821] E. coli transformed with pComb3H5BHis containing a VL- and VH-segment produce soluble scFv in sufficient amounts after excision of the gene III fragment and induction with 1 mM IPTG. Due to a suitable signal sequence, the scFv-chain is exported into the periplasma where it folds into a functional conformation.

[0822] Single E. coli TG1 bacterial colonies from the transformation plates are picked for periplasmic small scale preparations and grown in SB-medium (e.g. 10 ml) supplemented with 20 mM MgCl₂ and carbenicillin 50 μg/ml (and re-dissolved in PBS (e.g. 1 ml) after harvesting. By four rounds of freezing at −70° C. and thawing at 37° C., the outer membrane of the bacteria is destroyed by temperature shock and the soluble periplasmic proteins including the scFvs are released into the supernatant. After elimination of intact cells and cell-debris by centrifugation, the supernatant containing the anti-PSCA scFvs is collected and used for the identification of PSCA specific binders as follows:

[0823] Binding of scFvs to PSCA is tested by flow cytometry on PSCA transfected CHO cells (see example 24.1); untransfected CHO cell are used as negative control.

[0824] For flow cytometry 2,5×10⁵ cells are incubated with 50 μl of scFv periplasmic preparation or with 5 μg/ml of purified scFv in 50 μl PBS with 2% FCS. The binding of scFv is detected with an anti-His antibody (Penta-His Antibody, BSA free, Qiagen GmbH, Hilden, FRG) at 2 μg/ml in 50 μl PBS with 2% FCS. As a second step reagent a R-Phycoerythrin-conjugated affinity purified F(ab′)2 fragment, goat anti-mouse IgG (Fc-gamma fragment specific), diluted 1:100 in 50 μl PBS with 2% FCS (Dianova, Hamburg, FRG) is used. The samples are measured on a FACSscan (BD biosciences, Heidelberg, FRG).

[0825] Single clones are then analyzed for favourable properties and amino acid sequence. PSCA specific scFvs are converted into recombinant bispecific single chain antibodies by joining them via a Gly₄Ser₁-linker with the CD3 specific scFv I2C (SEQ ID NO. 185) or any other CD3 specific scFv of the invention to result, for example, in constructs with the domain arrangement VH_{PSCA}—(Gly₄Ser₁)₃—VL_{PSCA}—Gly₄Ser₁—VH_{CD 3}—(Gly₄Ser₁)₃—VL_{CD3} or VL_{PSCA}—(Gly₄Ser₁)₃—VH_{PSCA}—Gly₄Ser₁—VH_{CD3} (Gly₄Ser₁)₃—VL_{CD3} or alternative domain arrangements. For expression in CHO cells the coding sequences of (i) an N-terminal immunoglobulin heavy chain leader comprising a start codon embedded within a Kozak consensus sequence and (ii) a C-terminal Hise-tag followed by a stop codon are both attached in frame to the nucleotide sequence encoding the bispecific single chain antibodies prior to insertion of the resulting DNA-fragment as obtained by gene synthesis into the multiple cloning site of the expression vector pEF-DHFR (Raum et al. Cancer Immunol Immunother 50 (2001) 141-150). Stable transfection of DHFR-deficient CHO cells, selection for DHFR-positive transfectants secreting the bispecific single chain antibodies into the culture supernatant and gene amplification with methotrexat for increasing expression levels are carried out as described (Mack et al. Proc. Natl. Acad. Sci. USA 92 (1995) 7021-7025). All other state of the art procedures are carried out according to standard protocols (Sambrook, Molecular Cloning; A Laboratory Manual, 3rd edition, Cold Spring Harbour Laboratory Press, Cold Spring Harbour, New York (2001)).

[0826] Identification of functional bispecific single-chain antibody constructs is carried out by flowcytometric analysis of culture supernatant from transfected CHO cells. For this purpose CD3 binding is tested on the human CD3 positive T cell leukemia cell line HPB-ALL (DSMZ, Braunschweig, ACC483) and on the macaque T cell line 4119LnPx. Binding to tumor specific PSCA epitopes is tested on PSCA transfected CHO cells (see example 24.1). 200.000 cells of the respective cell line are incubated for 30 min. on ice with 50 μl of cell culture supernatant. The cells are washed twice in PBS with 2% FCS and bound bispecific single-chain antibody construct is detected with a murine anti-His antibody (Penta His antibody; Qiagen; diluted 1:20 in 50 μl PBS with 2% FCS). After washing, bound anti-His antibodies are detected with an Fc gamma-specific antibody (Dianova) conjugated to phycoerythrin, diluted 1:100 in PBS with 2% FCS. Supernatant of untransfected CHO cells is used as negative control.

[0827] Flow cytometry is performed on a FACS-Calibur apparatus; the CellQuest software is used to acquire and analyze the data (Becton Dickinson biosciences, Heidelberg). FACS staining and measuring of the fluorescence intensity are performed as described in Current Protocols in Immunology (Coligan, Kruisbeek, Margulies, Shevach and Strober, Wiley-Interscience, 2002).

[0828] Only those constructs showing bispecific binding to human and macaque CD3 as well as to human and macaque PSCA are selected for further use.

[0829] For protein production CHO cells expressing fully functional bispecific single chain antibody and adapted to nucleoside-free HyQ PF CHO liquid soy medium (with 4.0 mM L-Glutamine with 0.1% Pluronic F-68; HyClone) are grown in roller bottles with nucleoside-free HyQ PF CHO liquid soy medium (with 4.0 mM L-Glutamine with 0.1% Pluronic F-68; HyClone) for 7 days. Culture supernatant is cleared from cells by centrifugation and stored at −20° C. until purification. As chromatography equipment for purification of bispecific single chain antibody from culture supernatant Akta® Explorer System (GE Health Systems) and Unicorn® Software are used. Immobilized metal affinity chromatography (“IMAC”) is performed using a Fractogel EMD chelate® (Merck) which is loaded with ZnCl₂ according to the protocol provided by the manufacturer. The column is equilibrated with buffer A (20 mM sodium phosphate buffer pH 7.2, 0.1 M NaCl) and the cell culture supernatant (500 ml) is applied to the column (10 ml) at a flow rate of 3 ml/min. The column is washed with buffer A to remove unbound sample. Bound protein is eluted using a two step gradient of buffer B (20 mM sodium phosphate buffer pH 7.2, 0.1 M NaCl, 0.5 M Imidazole) according to the following:
[0830] Step 1: 20% buffer B in 6 column volumes
[0831] Step 2: 100% buffer B in 6 column volumes

[0832] Eluted protein fractions from step 2 are pooled for further purification. All chemicals are of research grade and purchased from Sigma (Deisenhofen) or Merck (Darmstadt).

[0833] Gel filtration chromatography is performed on a HiLoad 16/60 Superdex 200 prep grade column (GE/Amersham) equilibrated with Equi-buffer (25 mM Citrate, 200 mM Lysine, 5% Glycerol, pH 7.2). Eluted protein samples (flow rate 1 ml/min) are subjected to standard SDS-PAGE and Western Blot for detection. Prior to purification, the column is calibrated for molecular weight determination (molecular weight marker kit, Sigma MW GF-200). Protein concentrations are determined using OD280 nm.

[0834] Purified bispecific single chain antibody protein is analyzed in SDS PAGE under reducing conditions performed with pre-cast 4-12% Bis Tris gels (Invitrogen). Sample preparation and application are performed according to the protocol provided by the manufacturer. The molecular weight is determined with MultiMark protein standard (Invitrogen). The gel is stained with colloidal Coomassie (Invitrogen protocol). The purity of the isolated protein is >95% as determined by SDS-PAGE.

[0835] The bispecific single chain antibody has a molecular weight of about 52 kDa under native conditions as determined by gel filtration in PBS. All constructs are purified according to this method.

[0836] Western Blot is performed using an Optitran® BA-S83 membrane and the Invitrogen Blot Module according to the protocol provided by the manufacturer. For detection of the bispecific single chain antibody protein antibodies an anti-His Tag antibody is used (Penta His, Qiagen). A Goat-anti-mouse Ig antibody labeled with alkaline phosphatase (AP) (Sigma) is used as secondary antibody and BCIP/NBT (Sigma) as substrate. A single band is detected at 52 kD corresponding to the purified bispecific single chain antibody.

[0837] The potency in the human and the non-chimpanzee primate system of bispecific single chain antibodies interacting with human and macaque CD3 and with human and macaque PSCA is determined by a cytotoxicity assay based on chromium 51 (⁵¹Cr) release using PSCA transfected CHO cells as target cells (see example 24.1) and stimulated human CD4/CD56 depleted PBMC or the macaque T cell line 4119LnPx as effector cells.

[0838] Generation of stimulated human PBMC is performed as follows: A Petri dish (85 mm diameter, Nunc) is coated with a commercially available anti-CD3 specific antibody (e.g. OKT3, Othoclone) in a final concentration of 1 μg/ml for 1 hour at 37° C. Unbound protein is removed by one washing step with PBS. The fresh PBMC are isolated from peripheral blood (30-50 ml human blood) by Ficoll gradient centrifugation according to standard protocols. 3-5×10⁷ PBMC are added to the precoated petri dish in 50 ml of RPMI 1640 with stabilized glutamine/10% FCS/IL-2 20 U/ml (Proleukin, Chiron) and stimulated for 2 days. On the third day the cells are collected and washed once with RPMI 1640. IL-2 is added to a final concentration of 20 U/ml and the cells are cultivated again for one day in the same cell culture medium as above.

[0839] Target cells are washed twice with PBS and labelled with 11.1 MBq ⁵¹Cr in a final volume of 100 μl RPMI with 50% FCS for 45 minutes at 37° C. Subsequently the labelled target cells are washed 3 times with 5 ml RPMI and then used in the cytotoxicity assay. The assay is performed in a 96 well plate in a total volume of 250 μl supplemented RPMI (as above) with an E:T ratio of 10:1. 1 μg/ml of the cross-species specific bispecific single chain antibody molecules and 20 threefold dilutions thereof are applied. The assay time is 18 hours and cytotoxicity is measured as relative values of released chromium in the supernatant related to the difference of maximum lysis (addition of Triton-X) and spontaneous lysis (without effector cells). All measurements are done in quadruplicates. Measurement of chromium activity in the supernatants is performed with a Wizard 3” gamma counter (Perkin Elmer Life Sciences GmbH, Köln, Germany). Analysis of the experimental data is performed with Prism 4 for Windows (version 4.02, GraphPad Software Inc., San Diego, California, USA). Sigmoidal dose response curves typically have R² values>0.90 as determined by the software. EC₅₀ values as measure of potency are calculated by the analysis program.

### 25. Generation and Characterization of CD19 and CD3 Cross-Species Specific Bispecific Single Chain Antibody Molecules

### 25.1. Cloning and Expression of Human CD19 Antigen on CHO Cells

[0840] The sequence of the human CD19 antigen (NM_001770 Homo sapiens CD19 molecule (CD19), mRNA, National Center for Biotechnology Information, http://www.ncbi.nlm.nih.gov/entrez) was used to obtain a synthetic molecule by gene synthesis according to standard protocols. The gene synthesis fragment was also designed as to contain a Kozak site for eukaryotic expression of the construct and restriction sites at the beginning and the end of the DNA. The introduced restriction sites EcoRI at the 5′ end and SaII at the 3′ end were utilised during the cloning step into the expression plasmid designated pEFDHFR (Raum et al. Cancer Immunol Immunother 50 (2001) 141-150). After sequence verification the plasmid was used to transfect CHO/dhfr-cells as follows. A sequence verified plasmid was used to transfect CHO/dhfr-cells (ATCC No. CRL 9096; cultured in RPMI 1640 with stabilized glutamine obtained from Biochrom AG Berlin, Germany, supplemented with 10% FCS, 1% penicillin/streptomycin all obtained from Biochrom AG Berlin, Germany and nucleosides from a stock solution of cell culture grade reagents obtained from Sigma-Aldrich Chemie GmbH, Taufkirchen, Germany, to a final concentration of 10 μg/ml Adenosine, 10 μg/ml Deoxyadenosine and 10 μg/ml Thymidine, in an incubator at 37 C, 95% humidity and 7% CO₂). Transfection was performed using the PolyFect Transfection Reagent (Qiagen GmbH, Hilden, Germany) and 5 μg of plasmid DNA according to the manufacturer's protocol. After culture period of 24 hours cells were washed once with PBS and again cultured in the aforementioned cell culture medium except that the medium was not supplemented with nucleosides and dialysed FCS (obtained from Biochrom AG Berlin, Germany) was used. Thus the cell culture medium did not contain nucleosides and thereby selection was applied on the transfected cells. Approximately 14 days after transfection the outgrowth of resistant cells was observed. After an additional 7 to 14 days the transfectants were tested positive for expression of the construct via FACS. Eukaryotic protein expression in DHFR deficient CHO cells is performed as described by Kaufmann R. J. (1990) Methods Enzymol. 185, 537-566. Gene amplification of the construct is induced by increasing concentrations of methothrexate (MTX) to a final concentration of up to 20 nM MTX.

### 25.2. Generation of CD19 and CD3 Cross-Species Specific Bispecific Single Chain Molecules

[0841] Generally, bispecific single chain antibody molecules, each comprising a domain with a binding specificity for the human and the macaque CD3 antigen as well as a domain with a binding specificity for the human CD19 antigen, were designed as set out in the following Table 8:

TABLE 8
Formats of anti-CD3 and anti-CD19 cross-species specific
bispecific single chain antibody molecules

| SEQ ID (nucl/prot) | Formats of protein constructs (N → C) |
|---|---|
| 482/481 | HD37 LH × I2C HL |
| 486/485 | HD37 LH × F12Q HL |
| 484/483 | HD37 LH × H2C HL |
| 534/533 | hCD19 47-A3 LH × I2C HL |
| 522/521 | hCD19 46-B11LH × I2C HL |
| 510/509 | hCD19 45-A10 LH × I2C HL |
| 498/497 | hCD19 26-D6 LH × I2C HL |
| 546/545 | HD37-DT LH × I2C HL |
| 558/557 | HD37-A LH × I2C HL |
| 570/569 | HD37-G LH × I2C HL |
| 582/581 | HD37-S LH × I2C HL |
| 594/593 | HD37-T LH × I2C HL |
| 606/605 | HD37-1 LH × I2C HL |
| 618/617 | HD37-L LH × I2C HL |
| 630/629 | HD37-V LH × I2C HL |
| 642/641 | HD37-E LH × I2C HL |
| 654/653 | HD37-Q LH × I2C HL |
| 666/665 | HD37-N LH × I2C HL |
| 678/677 | HD37-K LH × I2C HL |
| 690/689 | HD37-R LH × I2C HL |
| 702/701 | HD37-H LH × I2C HL |
| 714/713 | HD37-Y LH × I2C HL |
| 726/725 | HD37-P LH × I2C HL |
| 738/737 | HD37-F LH × I2C HL |
| 750/749 | HD37-W LH × I2C HL |
| 762/761 | HD37-M LH × I2C HL |
| 1283/1282 | hCD19 5-A9 LH × I2C HL |
| 1297/1296 | hCD19 2-C6 LH × I2C HL |
| 1311/1310 | hCD19 4-C7 LH × I2C HL |
| 1325/1324 | hCD19 2-D7 LH × I2C HL |
| 1339/1338 | hCD19 2-D4 LH × I2C HL |
| 1353/1352 | hCD19 5-G3 LH × I2C HL |
| 1367/1366 | hCD19 4-E10 LH × I2C HL |
| 1381/1380 | hCD19 4-E3 LH × I2C HL |
| 1395/1394 | hCD19 3-H7 LH × I2C HL |

[0842] The aforementioned constructs containing the variable light-chain (L) and variable heavy-chain (H) domains specific for human CD19 and the CD3 specific VH and VL combinations cross-species specific for human and macaque CD3 were obtained by gene synthesis. The gene synthesis fragments were designed and eukaryotic protein expression was performed in analogy to the procedure described in example 9 for the MCSP×CD3 cross-species specific single chain molecules.

### 25.3. Expression and Purification of the Bispecific Single Chain Antibody Molecules

[0843] The bispecific single chain antibody molecules were expressed in chinese hamster ovary cells (CHO) or HEK 293 cells as described herein above for the MCSP×CD3 bispecific single chain antibodies.

[0844] The isolation and analysis of the expressed bispecific single chain antibodies has also been described herein above in Example 9.

### 25.4. Flow Cytometric Binding Analysis of the CD19 and CD3 Cross-Species Specific Bispecific Antibodies

[0845] In order to test the functionality of the cross-species specific bispecific antibody constructs with regard to binding capability to human CD19 as well as to human and macaque CD3, a FACS analysis was performed. For this purpose the CHO cells transfected with human CD19 as described in example 25.1 and human CD3 positive T cell leukemia cell line HPB-ALL (DSMZ, Braunschweig, ACC483) were used to check the binding to human antigens. The binding reactivity to macaque CD3 was tested by using a macaque T cell line 4119LnPx (kindly provided by Prof Fickenscher, Hygiene Institute, Virology, Erlangen-Nuernberg; Knappe A, et al., and Fickenscher H: Herpesvirus saimiri-transformed macaque T cells are tolerated and do not cause lymphoma after autologous reinfusion. Blood 2000; 95:3256-61.) 200,000 cells of the respective cell population were incubated for 30 min on ice with 50 μl of the purified protein of the cross-species specific bispecific antibody constructs (e. g. 2 μg/ml) Alternatively the cell culture supernatant of transiently produced proteins was used. The cells were washed twice in PBS and binding of the construct was detected with an unlabeled murine Penta His antibody (Qiagen; diluted 1:20 in 50 μl PBS with 2% FCS). After washing, bound anti His antibodies were detected with an Fc gamma-specific antibody (Dianova) conjugated to phycoerythrin, diluted 1:100 in 50 μl PBS with 2% FCS. Fresh culture medium was used as a negative control.

[0846] Flow cytometry was performed on a FACS-Calibur apparatus, the CellQuest software was used to aquire and analyze the data (Becton Dickinson biosciences, Heidelberg). FACS staining and measuring of the fluorescence intensity were performed as described in Current Protocols in Immunology (Coligan, Kruisbeek, Margulies, Shevach and Strober, Wiley-Interscience, 2002).

[0847] In the FACS analysis shown in FIG. 50 all tested constructs showed binding to human and macaque CD3 and to human CD19.

### 25.5. Bioactivity of CD19 and CD3 Cross-Species Specific Bispecific Single Chain Antibodies

[0848] The bioactivity of bispecific single chain antibodies was analyzed by chromium 51 release in vitro cytotoxicity assays using the CD19 positive cell line described in example 25.1. As effector cells stimulated human CD8 positive T cells or the macaque T cell line 4119LnPx were used.

[0849] The generation of stimulated human PBMC was described herein above in Example 11.

[0850] Target cells prepared and the assay was performed in analogy to the procedure described for the MCSP×CD3 bispecific single chain antibodies in example 11.

[0851] In the T cell cytotoxicity assay shown in FIG. 51 all tested bispecific single chain antibody constructs revealed cytotoxic activity against human CD19 positive target cells elicited by human CD8+ cells and against human CD19 positive target cells elicited by the macaque T cell line 4119LnPx. As a negative control, an irrelevant bispecific single chain antibody was used.

### 25.6. Generation of Additional CD19 and CD3 Cross-Species Specific Bispecific Single Chain Molecules

[0852] The human antibody germline VH sequence VH1 1-46 (http://vbase.mrccpe.cam.ac.uk/) is chosen as framework context for CDRH1 (SEQ ID NO 473), CDRH2 (SEQ ID NO 474) and CDRH3 (SEQ ID NO 475). For the human VH several degenerated oligonucleotides have to be synthesized that overlap in a terminal stretch of approximately 15-20 nucleotides. To this end every second primer is an antisense primer. For VH1 1-46 the following oligonucleotides are used (5′- to 3′):

5′-37VH-aXho1
(SEQ ID NO 763)
CAG CTG CTC GAG TCT GGG GCT GAG STG RWG ARG
CCT GGG KCC TCA GTG AAG RTT TCC TGC AAG GCT
TCT GGC
3′-37VH-b
(SEQ ID NO 764)
cca ctc aag acc ctg tcc agg GSS ctg cYt cac
cca gtt cat cca gta gct aGw gaa tgY ata gcc
aga agc ctt gca gga
5′-37VH-c
(SEQ ID NO 765)
GGA CAG GGT CTT GAG TGG ATK GGA CAG ATT TGG
CCT GGA GAT GGT GAT ACT AAC TAC AAT GGA AAG
TTC AAG
3′-37VH-d
(SEQ ID NO 766)
cag gct gct gag ttS cat gta gRc tgt gct ggt
gga tKY gtc ASS agt cak agt gRc tYt acc ctt
gaa ctt tcc att gta g
5′-37VH-e
(SEQ ID NO 767)
C ATG SAA CTC AGC AGC CTG SSA TCT GAG GAC ACT
GCG GTC TAT TWC TGT GCA AGA CGG GAG ACT ACG
ACG G
3′-37VH-fBstE2
(SEQ ID NO 768)
gga gac ggt gac cgt ggt ccc ttg gcc cca gta
gtc cat agc ata gta ata acg gcc tac cgt cgt
agt ctc ccg tct tgc

[0853] This primer set spans over the whole corresponding VH sequence.

[0854] Within the set primers are mixed in equal amounts (e.g. 1 μl of each primer (primer stocks 20 to 100 μM) to a 20 μl PCR reaction) and added to a PCR mix consisting of PCR buffer, nucleotides and Taq polymerase. This mix is incubated at 94° C. for 3 minutes, 65° C. for 1 minute, 62° C. for 1 minute, 59° C. for 1 minute, 56° C. for 1 minute, 52° C. for 1 minute, 50° C. for 1 minute and at 72° C. for 10 minutes in a PCR cycler. Subsequently the product is run in an agarose gel electrophoresis and the product of a size from 200 to 400 isolated from the gel according to standard methods.

[0855] The VH PCR product is then used as a template for a standard PCR reaction using primers that incorporate N-terminal and C-terminal suitable cloning restriction sites. The DNA fragment of the correct size (for a VH approximately 350 nucleotides) is isolated by agarose gel electrophoresis according to standard methods. In this way sufficient VH DNA fragment is amplified.

[0856] The human antibody germline VL sequence VkI 012 (http://vbase.mrccpe.cam.ac.uk/) is chosen as framework context for CDRL1 (SEQ ID NO 478), CDRL2 (SEQ ID NO 479) and CDRL3 (SEQ ID NO 480). For the human VL several degenerated oligonucleotides have to be synthesized that overlap in a terminal stretch of approximately 15-20 nucleotides. To this end every second primer is an antisense primer. Restriction sites needed for later cloning within the oligonucleotides are deleted. For VkI 012 the following oligonucleotides are used (5′- to 3′):

5′-37VL-A-SacI
(SEQ ID NO 769)
CAG CTG GAG CTC CAG ATG ACC CAG TCT CCA KCT TCT
TTG KCT GYG TCT STA GGG SAS AGA GYC ACC ATC WCC
TGC AAG GCC AGC
3′-37VL-B
(SEQ ID NO 770)
ctg ttg gta cca gtt caa ata aSt SNN acc atc ata
atc aac act ttg gct ggc ctt gca ggt gat ggt
5′-37VL-C
(SEQ ID NO 771)
TTG AAC TGG TAC CAA CAG AWA CCA GGA MAG SCA CCC
AAA CTC CTC ATC TAT GAT GCA TCC AAT CTA GTT TCT
3′-37VL-D
(SEQ ID NO 772)
gag ggt gaa gtc tgt ccc aga ccc act gcc act aaa
cct ggR tgg gaY ccc aga aac tag att gga tgc
5′-37VL-E
(SEQ ID NO 773)
GGG ACA GAC TTC ACC CTC AMC ATC MRT YCT STG SAG
MMG GWG GAT KYC GCA ACC TAT YAC TGT CAG CAA AGT
ACT GAG
3′-37VL-F-BsiW1Spe1
(SEQ ID NO 774)
ACT CAG ACT AGT CGT ACG ttt gat ctc cac ctt ggt
ccc ttg acc gaa cgt cca cgg atc ctc agt act ttg
ctg aca g

[0857] This primer sets spans over the whole corresponding VL sequence.

[0858] Within the set primers are mixed in equal amounts (e.g. 1 μl of each primer (primer stocks 20 to 100 μM) to a 20 μl PCR reaction) and added to a PCR mix consisting of PCR buffer, nucleotides and Taq polymerase. This mix is incubated at 94° C. for 3 minutes, 65° C. for 1 minute, 62° C. for 1 minute, 59° C. for 1 minute, 56° C. for 1 minute, 52° C. for 1 minute, 50° C. for 1 minute and at 72° C. for 10 minutes in a PCR cycler. Subsequently the product is run in an agarose gel electrophoresis and the product of a size from 200 to 400 isolated from the gel according to standard methods.

[0859] The VL PCR product is then used as a template for a standard PCR reaction using primers that incorporate N-terminal and C-terminal suitable cloning restriction sites. The DNA fragment of the correct size (for a VL approximately 330 nucleotides) is isolated by agarose gel electrophoresis according to standard methods. In this way sufficient VL DNA fragment is amplified.

[0860] The final VH1 1-46-based VH PCR product (i.e. the repertoire of human/humanized VH) is then combined with the final VkI 012-based VL PCR product (i.e. the repertoire of human/humanized VL) in the phage display vector pComb3H5Bhis to form a library of functional scFvs from which—after display on filamentous phage-anti-CD19 binders are selected, screened, identified and confirmed as described in the following:

[0861] 450 ng of the light chain fragments (Sacl-Spel digested) are ligated with 1400 ng of the phagemid pComb3H5Bhis (Sacl-Spel digested; large fragment). The resulting combinatorial antibody library is then transformed into 300 μl of electrocompetent Escherichia coli XL1 Blue cells by electroporation (2.5 kV, 0.2 cm gap cuvette, 25 ρFD, 200 Ohm, Biorad gene-pulser) resulting in a library size of more than 107 independent clones. After one hour of phenotype expression, positive transformants are selected for carbenicilline resistance encoded by the pComb3H5BHis vector in 100 ml of liquid super broth (SB)-culture over night. Cells are then harvested by centrifugation and plasmid preparation is carried out using a commercially available plasmid preparation kit (Qiagen).

[0862] 2800 ng of this plasmid-DNA containing the VL-library (Xhol-BstEII digested; large fragment) are ligated with 900 ng of the heavy chain V-fragments (Xhol-BstEII digested) and again transformed into two 300 μl aliquots of electrocompetent E. coli XL1 Blue cells by electroporation (2.5 kV, 0.2 cm gap cuvette, 25 PFD, 200 Ohm) resulting in a scFv library with a size of more than 107 independent clones.

[0863] After phenotype expression and slow adaptation to carbenicilline, the E. coli cells containing the antibody library are transferred into SB-carbenicilline (SB with 50 μg/mL carbenicilline) selection medium. The E. coli cells containing the antibody library are then infected with an infectious dose of 1012 particles of helper phage VCSM13 resulting in the production and secretion of filamentous M13 phage, wherein each phage particle contains single stranded pComb3H5BHis-DNA encoding a scFv-fragment and displays the corresponding scFv-protein as a translational fusion to phage coat protein Ill. This pool of phages displaying the antibody library is used for the selection of antigen binding entities.

[0864] For this purpose the phage library carrying the cloned scFv-repertoire is harvested from the respective culture supernatant by PEG8000/NaCl precipitation and centrifugation. Approximately 1011 to 1012 scFv phage particles are resuspended in 0.4 ml of PBS/0.1% BSA and incubated with 10⁵ to 10⁷ CD19 transfected CHO cells (see example 1) for 1 hour on ice under slow agitation. These CD19 transfected CHO cells are harvested beforehand by centrifugation, washed in PBS and resuspended in PBS/1% FCS (containing Na Azide). scFv phage which do not specifically bind to the CD19 transfected CHO cells are eliminated by up to five washing steps with PBS/1% FCS (containing Na Azide). After washing, binding entities are eluted from the cells by resuspending the cells in HCl-glycine pH 2.2 (10 min incubation with subsequent vortexing) and after neutralization with 2 M Tris pH 12, the eluate is used for infection of a fresh uninfected E. coli XL1 Blue culture (OD600>0.5). The E. coli culture containing E. coli cells successfully transduced with a phagemid copy, encoding a human/humanized scFv-fragment, are again selected for carbenicilline resistance and subsequently infected with VCMS 13 helper phage to start the second round of antibody display and in vitro selection. A total of 4 to 5 rounds of selections are carried out, normally.

[0865] In order to screen for CD19 specific binders plasmid DNA corresponding to 4 and 5 rounds of panning is isolated from E. coli cultures after selection. For the production of soluble scFv-protein, the scFv-DNA fragments are excised from the plasmids (Xhol-Spel). These fragments are cloned via the same restriction sites into the plasmid pComb3H5BFlag/His differing from the original pComb3H5BHis in that the expression construct (i.e. the scFv) includes a Flag-tag (DYKDDDDK, SEQ ID NO 775) at its C-terminus before the His6-tag and that phage protein III/N2 domain and protein III/CT domain had been deleted. After ligation, each pool (different rounds of panning) of plasmid DNA is transformed into 100 μl heat shock competent E. coli TG1 or XLI blue and plated onto carbenicilline LB-agar. Single colonies are picked into 100 μl of LB carb (LB with 50 μg/ml carbenicilline).

[0866] E. coli transformed with pComb3H5BFlag/His containing a scFv-DNA fragment produce soluble scFv-protein in sufficient amounts after induction with 1 mM IPTG. Due to a suitable signal sequence, the scFv is exported into the periplasma where it folds into a functional conformation.

[0867] Single E. coli TG1 bacterial colonies from the transformation plates are picked for periplasmic small scale preparations and grown in SB-medium (e.g. 10 ml) supplemented with 20 mM MgCl₂ and carbenicilline 50 μg/ml (and re-dissolved in PBS (e.g. 1 ml) after harvesting. A temperature shock is applied by four rounds of freezing at −70° C. and thawing at 37° C. whereby the outer membrane of the bacteria is destroyed and the soluble periplasmic proteins including the scFvs are released into the supernatant. After elimination of intact cells and cell-debris by centrifugation, the supernatant containing the anti-CD19 scFvs is collected and used for the identification of CD19 specific binders as follows: Binding of scFvs to CD19 is tested by flow cytometry on CD19 transfected CHO cells (see example 25.1); untransfected CHO cells are use as negative control.

[0868] For flow cytometry 2.5×10⁵ cells are incubated with 50 μl of scFv periplasmic preparation or with 5 μg/ml of purified scFv in 50 μl PBS with 2% FCS. The binding of scFv is detected with an anti-His antibody (Penta-His Antibody, BSA free, Qiagen GmbH, Hilden, FRG) at 2 μg/ml in 50 μl PBS with 2% FCS. As a second step reagent a R-Phycoerythrin-conjugated affinity purified F(ab′)2 fragment, goat anti-mouse IgG (Fc-gamma fragment specific), diluted 1:100 in 50 μl PBS with 2% FCS (Dianova, Hamburg, FRG) is used. The samples are measured on a FACSscan (BD biosciences, Heidelberg, FRG).

[0869] Single clones are then analyzed for favourable properties and amino acid sequence. CD19 specific scFvs are converted into recombinant bispecific single chain antibodies by joining them via a Gly₄Ser₁-linker with the CD3 specific scFv I2C (amino acid sequence SEQ ID NO 185, nucleic acid sequence SEQ ID NO 186) or any other CD3 specific scFv of the invention to result in constructs with the domain arrangement VLCD19—(Gly₄Ser₁)₃—VHCD19—Gly₄Ser₁—VHCD3—(Gly₄Ser₁)₃ VLCD3. For expression in CHO cells the coding sequences of (i) an N-terminal immunoglobulin heavy chain leader comprising a start codon embedded within a Kozak consensus sequence and (ii) a C-terminal His6-tag followed by a stop codon are both attached in frame to the nucleotide sequence encoding the bispecific single chain antibodies prior to insertion of the resulting DNA-fragment as obtained by gene synthesis into the multiple cloning site of the expression vector pEF-DHFR (Raum et al. Cancer Immunol Immunother 50 (2001) 141-150). Transfection of the generated expression plasmids, protein expression and purification of cross-species specific bispecific antibody constructs are performed as described in Examples 25.2 and 25.3. All other state of the art procedures are carried out according to standard protocols (Sambrook, Molecular Cloning; A Laboratory Manual, 3rd edition, Cold Spring Harbour Laboratory Press, Cold Spring Harbour, New York (2001)).

[0870] Identification of functional bispecific single-chain antibody constructs is carried out by flow cytometric binding analysis of culture supernatant from transfected cells expressing the cross-species specific bispecific antibody constructs. Analysis is perfomed as described in Example 25.4.

[0871] Only those constructs showing bispecific binding to human and macaque CD3 as well as to CD19 are selected for further use.

[0872] The cytotoxic activity of cross-species specific bispecific single chain antibody constructs against CD19 positive target cells elicited by effector T cells is analyzed as described in Example 25.5. CHO-cells transfected with human CD19 are used as target cells and stimulated CD4/CD56-depleted human PBMCs or the macaque T cell line 4119LnPx as effector T cells. Only those constructs showing potent redirected T cell cytotoxicity against CD19-positive target cells are selected for further use.

### 26. Generation and Characterization of C-MET and CD3 Cross-Species Specific Bispecific Single Chain Antibody Molecules

### 26.1 Generation of CHO Cells Expressing Human C-MET

[0873] The coding sequence of human C-MET as published in GenBank (Accession number NM_000245) was obtained by gene synthesis according to standard protocols. The gene synthesis fragment was designed as to contain first a Kozak site for eukaryotic expression of the construct followed by the coding sequence of the human C-MET protein and a stop codon (the cDNA and amino acid sequence of the construct is listed under SEQ ID Nos 776 and 777). The gene synthesis fragment was also designed as to introduce restriction sites at the beginning and at the end of the fragment. The introduced restriction sites, EcoRI at the 5′ end and SaII at the 3′ end, were utilised in the following cloning procedures. Internal restriction sites were removed by silent mutation of the coding sequence in the gene synthesis fragment (SaII: nucleotide 366 from C to G; EcoRI and Xbal: nucleotides 2059 to 2061 from TCT to AGC; EcoRI: nucleotide 2304 from T to C). The gene synthesis fragment was cloned via EcoRI and SaII into a plasmid designated pEF-DHFR (pEF-DHFR is described in Raum et al. Cancer Immunol Immunother 50 (2001) 141-150) following standard protocols. The aforementioned procedures were carried out according to standard protocols (Sambrook, Molecular Cloning; A Laboratory Manual, 3rd edition, Cold Spring Harbour Laboratory Press, Cold Spring Harbour, New York (2001)). A clone with sequence-verified nucleotide sequence was transfected into DHFR deficient CHO cells for eukaryotic expression of the construct. Eukaryotic protein expression in DHFR deficient CHO cells was performed as described by Kaufmann R. J. (1990) Methods Enzymol. 185, 537-566. Gene amplification of the construct was induced by increasing concentrations of methotrexate (MTX) to a final concentration of up to 20 nM MTX.

### 26.2 Generation of CHO Cells Expressing Macaque C-MET

[0874] The cDNA sequence of macaque C-MET (cynomolgus) was obtained by a set of 5 PCRs on cDNA from macaque monkey Liver prepared according to standard protocols. The following reaction conditions: 1 cycle at 94° C. for 2 minutes followed by 40 cycles with 94° C. for 1 minute, 56° C. for 1 minute and 72° C. for 3 minutes followed by a terminal cycle of 72° C. for 3 minutes and the following primers were used:

4.
forward primer:
(SEQ ID NO: 778)
5′-aggaattcaccatgaaggcccccgctgtgcttgcacc-3′
reverse primer:
(SEQ ID NO: 779)
5′-ctccagaggcatttccatgtagg-3′
5.
forward primer:
(SEQ ID NO: 780)
5′-gtccaaagggaaactctagatgc-3′
reverse primer:
(SEQ ID NO: 781)
5′-ggagacactggatgggagtccagg-3′
6.
forward primer:
(SEQ ID NO: 782)
5′-catcagagggtcgcttcatgcagg-3′
reverse primer:
(SEQ ID NO: 783)
5′-gctttggttttcagggggagttgc-3′
7.
forward primer:
(SEQ ID NO: 784)
5′-atccaaccaaatcttttattagtggtgg-3′
reverse primer:
(SEQ ID NO: 785)
5′-gacttcattgaaatgcacaatcagg-3′
8.
forward primer:
(SEQ ID NO: 786)
5′-tgctctaaatccagagctggtcc-3′
reverse primer:
(SEQ ID NO: 787)
5′-gtcagataagaaattccttagaatcc-3′

[0875] These PCRs generated five overlapping fragments, which were isolated and sequenced according to standard protocols using the PCR primers, and thereby provided a portion of the cDNA sequence coding macaque C-MET from codon 10 of the leader peptide to the last codon of the mature protein. To generate a construct for expression of macaque C-MET a cDNA fragment was obtained by gene synthesis according to standard protocols (the cDNA and amino acid sequence of the construct is listed under SEQ ID Nos 788 and 789). In this construct the coding sequence of macaque C-MET from amino acid 10 of the leader peptide to the last amino acid of the mature C-MET protein followed by a stop codon was fused in frame to the coding sequence of the amino acids 1 to 9 of the leader peptide of the human C-MET protein. The gene synthesis fragment was also designed as to contain a Kozak site for eukaryotic expression of the construct and restriction sites at the beginning and the end of the fragment containing the cDNA. The introduced restriction sites, EcoRI at the 5′ end and SaII at the 3′ end, were utilised in the following cloning procedures. Internal restriction sites were removed by silent mutation of the coding sequence in the gene synthesis fragment (SaII: nucleotide 366 from C to G; EcoRI: nucleotide 2055 from G to C). The gene synthesis fragment was cloned via EcoRI and SaII into a plasmid designated pEF-DHFR (pEF-DHFR is described in Raum et al. Cancer Immunol Immunother 50 (2001) 141-150) following standard protocols. The aforementioned procedures were carried out according to standard protocols (Sambrook, Molecular Cloning; A Laboratory Manual, 3rd edition, Cold Spring Harbour Laboratory Press, Cold Spring Harbour, New York (2001)). A clone with sequence-verified nucleotide sequence was transfected into DHFR deficient CHO cells for eukaryotic expression of the construct. Eukaryotic protein expression in DHFR deficient CHO cells was performed as described by Kaufmann R. J. (1990) Methods Enzymol. 185, 537-566. Gene amplification of the construct was induced by increasing concentrations of methotrexate (MTX) to a final concentration of up to 20 nM MTX.

### 26.3 Generation of C-MET and CD3 Cross-Species Specific Bispecific Single Chain Molecules

### Cloning of Cross-Species Specific Binding Molecules

[0876] Generally, bispecific single chain antibody molecules, each comprising a domain with a binding specificity cross-species specific for human and non-chimpanzee primate CD3epsilon as well as a domain with a binding specificity for C-MET, were designed as set out in the following Table 9:

TABLE 9
Formats of anti-C-MET and anti-CD3 cross-species specific
bispecific single chain antibody molecules

| SEQ ID (nucl/prot) | Formats of protein constructs (N → C) |
|---|---|
| 830/829 | MET1HL × I2CHL |
| 854/853 | MET4HL × I2CHL |
| 872/871 | MET5HL × I2CHL |
| 890/889 | MET6HL × I2CHL |
| 832/831 | MET1LH × I2CHL |
| 856/855 | MET4LH × I2CHL |
| 874/873 | MET5LH × I2CHL |
| 892/891 | MET6LH × I2CHL |
| 906/905 | MET7LH × I2CHL |

[0877] The aforementioned constructs containing the variable light-chain (L) and variable heavy-chain (H) domains specific for C-MET and the CD3 specific VH and VL combinations cross-species specific for human and macaque CD3 were obtained by gene synthesis. The gene synthesis fragments were designed and eukaryotic protein expression was performed in analogy to the procedure described in example 9 for the MCSP×CD3 cross-species specific single chain molecules. The bispecific single chain antibody molecules were expressed in chinese hamster ovary cells (CHO) or HEK 293 cells as described herein above for the MCSP×CD3 bispecific single chain antibodies.

[0878] The isolation and analysis of the expressed bispecific single chain antibodies has also been described herein above in Example 9.

[0879] As shown in FIG. 55 all of the generated cross-species specific bispecific single chain antibody constructs demonstrated cytotoxic activity against macaque cMET positive target cells elicited by the macaque T cell line 4119LnPx.

### 26.5 Flow Cytometric Binding Analysis of the C-MET and CD3 Cross-Species Specific Bispecific Antibodies

[0880] In order to test the functionality of the cross-species specific bispecific antibody constructs regarding the capability to bind to C-MET and human and macaque CD3, respectively, a FACS analysis was performed. For this purpose the human C-MET positive breast cancer cell line MDA-MB-231 (ATCC No. HTB-26) and the human CD3 positive T cell leukemia cell line HPB-ALL (DSMZ, Braunschweig, ACC483) were used to test the binding to human antigens. The binding reactivity to macaque CD3 was tested by using the macaque T cell line 4119LnPx (kindly provided by Prof Fickenscher, Hygiene Institute, Virology, Erlangen-Nuernberg; published in Knappe A, et al., and Fickenscher H., Blood 2000, 95, 3256-61). 200.000 cells of the respective cell lines were incubated for 30 min on ice with with 50 μl of cell culture supernatant of transfected cells expressing the cross-species specific bispecific antibody constructs. The cells were washed twice in PBS with 2% FCS and binding of the construct was detected with a murine Penta His antibody (Qiagen; diluted 1:20 in 50 μl PBS with 2% FCS). After washing, bound anti His antibodies were detected with an Fc gamma-specific antibody (Dianova) conjugated to phycoerythrin, diluted 1:100 in PBS with 2% FCS. Supernatant of untransfected cells was used as a negative control.

[0881] Flow cytometry was performed on a FACS-Calibur apparatus, the CellQuest software was used to acquire and analyze the data (Becton Dickinson biosciences, Heidelberg). FACS staining and measuring of the fluorescence intensity were performed as described in Current Protocols in Immunology (Coligan, Kruisbeek, Margulies, Shevach and Strober, Wiley-Interscience, 2002).

[0882] The bispecific binding of the single chain molecules listed above, which are specific for C-MET and cross-species specific for human and non-chimpanzee primate CD3 was clearly detectable as shown in FIG. 52. In the FACS analysis all constructs showed binding to CD3 and C-MET compared to the negative control. Cross-species specificity of the bispecific antibodies for human and macaque CD3 was demonstrated.

### 26.6 Bioactivity of C-MET and CD3 Cross-Species Specific Bispecific Single Chain Antibodies

[0883] Bioactivity of the generated bispecific single chain antibodies was analyzed by chromium 51 (⁵¹Cr) release in vitro cytotoxicity assays using the MDA-MB-231 cell line. As effector cells stimulated human CD4/CD56 depleted PBMC were used.

[0884] The generation of stimulated human PBMC was described herein above in Example 11. Target cells prepared and the assay was performed in analogy to the procedure described for the MCSP×CD3 bispecific single chain antibodies in example 11.

[0885] As shown in FIG. 53 all of the generated cross-species specific bispecific single chain antibody constructs demonstrated cytotoxic activity against C-MET positive target cells elicited by stimulated human CD4/CD56 depleted PBMC.

### 26.7 Generation of Additional C-MET and CD3 Cross-Species Specific Bispecific Single Chain Molecules

[0886] The human antibody germline VH sequence VH1 1-03 (http://vbase.mrccpe.cam.ac.uk/) is chosen as framework context for CDRH1 (SEQ ID NO 821), CDRH2 (SEQ ID NO 822) and CDRH3 (SEQ ID NO 823). Likewise human antibody germline VH sequence VH1 1-46 (http://vbase.mrc-cpe.cam.ac.uk/) is chosen as framework context for CDRH1 (SEQ ID NO 836), CDRH2 (SEQ ID NO 837) and CDRH3 (SEQ ID NO 838). For each human VH several degenerated oligonucleotides have to be synthesized that overlap in a terminal stretch of approximately 15-20 nucleotides. To this end every second primer is an antisense primer. For VH1 1-03 the following oligonucleotides are used:

5′CM1-VH-A-XhoI
(SEQ ID NO: 790)
CCA TGT CTC GAG TCT GGG SCT GAA STG RWG ARG CCT
GGG GCT TCA GTG AAA RTG TCC TGC ARG GCT TCG GGC
TAT ACC TTC
3′CM1-VH-B
(SEQ ID NO: 791)
AT CCA CTC AAG CCY TTG TCC AGG CSY CTG TYT AAC
CCA GTG CAA CCA GTA GCT GGT GAA GGT ATA GCC CGA
AGC
5′CM1-VH-C
(SEQ ID NO: 792)
GG CTT GAG TGG ATK GGC ATG ATT GAT CCT TCC AAT
AGT GAC ACT AGG TTT AAT CCG AAC TTC AAG GAC
3′CM1-VH-D
(SEQ ID NO: 793)
GCT GCT GAG CWS CAT GTA GGC TGT GYT GGM AGA TST
GTC TMY AKT SAW TGT GRC CYT GTC CTT GAA GTT CGG
ATT
5′CM1-VH-E
(SEQ ID NO: 794)
GCC TAC ATG SWA CTC AGC AGC CTG ASA TCT GMG GAC
ACT GCA GTC TAT TAC TGT GCC ASA TAT GGT AGC TAC
GTT
3′CM1-VH-F-BstEII
(SEQ ID NO: 795)
CAT GTA GGT GAC CGA GGT TCC TTG ACC CCA GTA GTC
CAG AGG GGA AAC GTA GCT ACC ATA

[0887] For VH1 1-46 the oligonucleotides are as follows:

5′ CM3-VH-A-XhoI
(SEQ ID NO: 796)
CCA TGT CTC GAG TCT GGG RCT GAA STG RWG AAG CCT
GGG GCT TCA GTG AAG STG TCC TGC AAG GCT TCT
3′ CM3-VH-B
(SEQ ID NO: 797)
CTC AAG GCC TTG TCC AGG CSY CTG CYT CAC CCA GTG
TAT CCA GTA ACT GGT GAA GGT GTA GCC AGA AGC CTT
GCA GGA
5′ CM3-VH-C
(SEQ ID NO: 798
CCT GGA CAA GGC CTT GAG TGG ATK GGA GAG ATT AAT
CCT AGC AGC GGT CGT ACTA AC TAC AAC GAG AAA TTC
3′ CM3-VH-D
(SEQ ID NO: 799)
C TGT GGA GGT AGA TKT GTC TMY AGT CAY TGT GAC CYT
GTT CTT GAA TTT CTC GTT GTA GTT
5′ CM3-VH-E
(SEQ ID NO: 800)
A TCT ACC TCC ACA GYC TAC ATG SAA CTC AGC ARC CTG
ASA TCT GAG GAC ACT GCG GTC TAT TAC TGT GCA
3′ CM3-VH-F-BstEII
(SEQ ID NO: 801)
CAT GTA GGT GAC CGT GGT GCC TTG GCC CCA GTA GCC
CCT WCT TGC ACA GTA ATA GAC CGC

[0888] Each of these primer sets spans over the whole corresponding VH sequence.

[0889] Within each set primers are mixed in equal amounts (e.g. 1 μl of each primer (primer stocks 20 to 100 μM) to a 20 μl PCR reaction) and added to a PCR mix consisting of PCR buffer, nucleotides and Taq polymerase. This mix is incubated at 94° C. for 3 minutes, 65° C. for 1 minute, 62° C. for 1 minute, 59° C. for 1 minute, 56° C. for 1 minute, 52° C. for 1 minute, 50° C. for 1 minute and at 72° C. for 10 minutes in a PCR cycler. Subsequently the product is run in an agarose gel electrophoresis and the product of a size from 200 to 400 isolated from the gel according to standard methods.

[0890] Each VH PCR product is then used as a template for a standard PCR reaction using primers that incorporate N-terminal and C-terminal suitable cloning restriction sites. The DNA fragment of the correct size (for a VH approximately 350 nucleotides) is isolated by agarose gel electrophoresis according to standard methods. In this way sufficient VH DNA fragment is amplified.

[0891] The human antibody germline VL sequence Vkll O 11 (http://vbase.mrccpe.cam.ac.uk/) is chosen as framework context for CDRL1 (SEQ ID NO 816), CDRL2 (SEQ ID NO 817) and CDRL3 (SEQ ID NO 818). Likewise human antibody germline VL sequence Vkll A1 (http://vbase.mrc-cpe.cam.ac.uk/) is chosen as framework context for CDRL1 (SEQ ID NO 833), CDRL2 (SEQ ID NO 834) and CDRL3 (SEQ ID NO 835). For each human VL several degenerated oligonucleotides have to be synthesized that overlap in a terminal stretch of approximately 15-20 nucleotides. To this end every second primer is an antisense primer. Restriction sites needed for later cloning within the oligonucleotides are deleted. For Vkll O 11 the following oligonucleotides are used:

5′ CM1-VL-A-SacI
(SEQ ID NO: 802)
CCT GTA GAG CTC GTG ATG ACC CAG ACT CCA YYC TCC
CTA MCT GTG ACA SYT GGA GAG MMG GYT TCT RTC AGC
TGC AAG TCC AGT
3′ CM1-VL-B
(SEQ ID NO: 803)
GTA CCA GGC CAA GTA GTT CTT CTG ACT GCT AGT ATA
TAA AAG GGA CTG ACT GGA CTT GCA GCT GA
5′ CM1-VL-C
(SEQ ID NO: 804)
TAC TTG GCC TGG TAC CWG CAG AAA CCA GGT CAG TCT
CCT MAA CTG CTG ATT TAC TGG GCA TCC ACT AGG
3′ CM1-VL-D
(SEQ ID NO: 805)
GAG AGT GAA ATC TGT CCC AGA TCC ACT GCC TGA GAA
GCG ATC AGG GAC CCC AGA TTC CC TAGT GGA TGC CCA
GTA
5′ CM1-VL-E
(SEQ ID NO: 806)
ACA GAT TTC ACT CTC AMA ATC TCC AGW GTG RAG GCT
GAS GAC STG GSA GTT TAT TAC TGT CAG CAA TAT
3′ CM1-VL-F-BsiWI/SpeI
(SEQ ID NO: 807)
CCT CAG ACT AGT CGT ACG TTT GAT CTC CAA CTT TGT
GCC TCC ACC GAA CGT CCA CGG ATA GGC ATA ATA TTG
CTG ACA GTA ATA

[0892] For Vkll A1 the oligonucleotides are as follows:

5′ CM3-VL-A-SacI
(SEQ ID NO: 808)
CCT GTA GAG CTC GTG ATG ACC CAA TCT CCA SYT TCT
TTG SCT GTG ACT CTA GGG CAG CSG GCC TCC ATC TCC
TGC
3′ CM3-VL-Ba
(SEQ ID NO: 809)
GAA CCA ACT CAT ATA ACT ACC ACC ATC ATA ATC AAC
ACT TTG GCT GGC CTT GCA GGA GAT GGA GGC
3′ CM3-VL-Bb
(SEQ ID NO: 810)
GAA CCA ACT CAT ATA ACT ACC ACC ATC ATA ATC AAC
ACT AGA TTG GCT GGC CTT GCA GGA GAT GGA GGC
5′ CM3-VL-C
(SEQ ID NO: 811)
AGT TAT ATG AGT TGG TTC CAA CAG AGA CCA GGA CAG
YCA CCC ARA CKC CTC ATC TMT GCT GCA TCC AAT CTA
3′ CM3-VL-D
(SEQ ID NO: 812)
GGT GAA GTC TGT CCC AGA GCC ACT GCC ACT AAA CCT
GKC TGG GAY CCC AGA TTC TAG ATT GGA TGC AGC
5′ CM3-VL-E
(SEQ ID NO: 813)
TCT GGG ACA GAC TTC ACC CTC AAK ATC YMT CST GTG
GAG GMG GAG GAT GTT GSA RYC TAT TACT GT CAG CAA
AGT
3′ CM3-VL-F-BsiWI/SpeI
(SEQ ID NO: 814)
ACT AGT CGT ACG TTT GAT CTC CAG CTT GGT CCC CTG
ACC CCT CAG ACT AGT CGT ACG TTT GAT CTC GAA CGT
GAG CGG ATC CTC ATA ACT TTG CTG ACA GTA ATA

[0893] Each of these primer sets spans over the whole corresponding VL sequence.

[0894] Within each set primers are mixed in equal amounts (e.g. 1 μl of each primer (primer stocks 20 to 100 μM) to a 20 μl PCR reaction) and added to a PCR mix consisting of PCR buffer, nucleotides and Taq polymerase. This mix is incubated at 94° C. for 3 minutes, 65° C. for 1 minute, 62° C. for 1 minute, 59° C. for 1 minute, 56° C. for 1 minute, 52° C. for 1 minute, 50° C. for 1 minute and at 72° C. for 10 minutes in a PCR cycler. Subsequently the product is run in an agarose gel electrophoresis and the product of a size from 200 to 400 isolated from the gel according to standard methods.

[0895] Each VL PCR product is then used as a template for a standard PCR reaction using primers that incorporate N-terminal and C-terminal suitable cloning restriction sites. The DNA fragment of the correct size (for a VL approximately 330 nucleotides) is isolated by agarose gel electrophoresis according to standard methods. In this way sufficient VL DNA fragment is amplified.

[0896] The final VH1 1-03-based VH PCR product (i.e. the repertoire of human/humanized VH) is then combined with the final Vkll O 11-based VL PCR product (i.e. the repertoire of human/humanized VL) and the final VH1 1-46-based VH PCR product (i.e. the repertoire of human/humanized VH) with the final Vkll A1-based VL PCR product (i.e. the repertoire of human/humanized VL) in the phage display vector pComb3H5Bhis to form two different libraries of functional scFvs from which—after display on filamentous phage—anti-C-MET binders are selected, screened, identified and confirmed as described in the following:

[0897] 450 ng of the light chain fragments (Sacl-Spel digested) are ligated with 1400 ng of the phagemid pComb3H5Bhis (Sacl-Spel digested; large fragment). The resulting combinatorial antibody library is then transformed into 300 μl of electrocompetent Escherichia coli XL1 Blue cells by electroporation (2.5 kV, 0.2 cm gap cuvette, 25 μFD, 200 Ohm, Biorad gene-pulser) resulting in a library size of more than 10⁷ independent clones. After one hour of phenotype expression, positive transformants are selected for carbenicilline resistance encoded by the pComb3H5BHis vector in 100 ml of liquid super broth (SB)-culture over night. Cells are then harvested by centrifugation and plasmid preparation is carried out using a commercially available plasmid preparation kit (Qiagen).

[0898] 2800 ng of this plasmid-DNA containing the VL-library (Xhol-BstEII digested; large fragment) are ligated with 900 ng of the heavy chain V-fragments (Xhol-BstEII digested) and again transformed into two 300 μl aliquots of electrocompetent E. coli XL1 Blue cells by electroporation (2.5 kV, 0.2 cm gap cuvette, 25 μFD, 200 Ohm) resulting in a total VH-VL scFv (single chain variable fragment) library size of more than 10⁷ independent clones.

[0899] After phenotype expression and slow adaptation to carbenicillin, the E. coli cells containing the antibody library are transferred into SB-carbenicillin (SB with 50 μg/mL carbenicillin) selection medium. The E. coli cells containing the antibody library are then infected with an infectious dose of 10¹² particles of helper phage VCSM13 resulting in the production and secretion of filamentous M13 phage, wherein each phage particle contains single stranded pComb3H5BHis-DNA encoding a scFv-fragment and displays the corresponding scFv-protein as a translational fusion to phage coat protein Ill. This pool of phages displaying the antibody library is used for the selection of antigen binding entities.

[0900] For this purpose the phage library carrying the cloned scFv-repertoire is harvested from the respective culture supernatant by PEG8000/NaCl precipitation and centrifugation. Approximately 10¹¹ to 10¹² scFv phage particles are resuspended in 0.4 ml of PBS/0.1% BSA and incubated with 10⁵ to 10⁷ C-MET transfected CHO cells (see example 26.1) for 1 hour on ice under slow agitation. These C-MET transfected CHO cells are harvested beforehand by centrifugation, washed in PBS and resuspended in PBS/1% FCS (containing Na Azide). scFv phage which do not specifically bind to the C-MET transfected CHO cells are eliminated by up to five washing steps with PBS/1% FCS (containing Na Azide). After washing, binding entities are eluted from the cells by resuspending the cells in HCl-glycine pH 2.2 (10 min incubation with subsequent vortexing) and after neutralization with 2 M Tris pH 12, the eluate is used for infection of a fresh uninfected E. coli XL1 Blue culture (OD600>0.5). The E. coli culture containing E. coli cells successfully transduced with a phagemid copy, encoding a human/humanized scFv-fragment, are again selected for carbenicillin resistance and subsequently infected with VCMS 13 helper phage to start the second round of antibody display and in vitro selection. A total of 4 to 5 rounds of selections are carried out, normally.

[0901] In order to screen for C-MET specific binders plasmid DNA corresponding to 4 and 5 rounds of panning is isolated from E. coli cultures after selection. For the production of soluble scFv-protein, VH-VL-DNA fragments are excised from the plasmids (Xhol-Spel). These fragments are cloned via the same restriction sites into the plasmid pComb3H5BFlag/His differing from the original pComb3H5BHis in that the expression construct (e.g. scFv) includes a Flag-tag (DYKDDDDK) between the scFv and the His6-tag and the additional phage proteins are deleted. After ligation, each pool (different rounds of panning) of plasmid DNA is transformed into 100 μl heat shock competent E. coli TG1 or XLI blue and plated onto carbenicillin LB-agar. Single colonies are picked into 100 μl of LB carb (LB with 50 μg/ml carbenicillin).

[0902] E. coli transformed with pComb3H5BHis containing a VL-and VH-segment produce soluble scFv in sufficient amounts after excision of the gene III fragment and induction with 1 mM IPTG. Due to a suitable signal sequence, the scFv is exported into the periplasma where it folds into a functional conformation.

[0903] Single E. coli TG1 bacterial colonies from the transformation plates are picked for periplasmic small scale preparations and grown in SB-medium (e.g. 10 ml) supplemented with 20 mM MgCl₂ and carbenicillin 50 μg/ml (and re-dissolved in PBS (e.g. 1 ml) after harvesting. A temperature shock is applied by four rounds of freezing at −70° C. and thawing at 37° C. whereby the outer membrane of the bacteria is destroyed and the soluble periplasmic proteins including the scFvs are released into the supernatant. After elimination of intact cells and cell-debris by centrifugation, the supernatant containing the anti-C-MET scFvs is collected and used for the identification of C-MET specific binders as follows:

[0904] Binding of scFvs to C-MET is tested by flow cytometry on C-MET transfected CHO cells (see example 247.1); untransfected CHO cells are use as negative control.

[0905] For flow cytometry 2.5×10⁵ cells are incubated with 50 μl of scFv periplasmic preparation or with 5 μg/ml of purified scFv in 50 μl PBS with 2% FCS. The binding of scFv is detected with an anti-His antibody (Penta-His Antibody, BSA free, Qiagen GmbH, Hilden, FRG) at 2 μg/ml in 50 μl PBS with 2% FCS. As a second step reagent a R-Phycoerythrin-conjugated affinity purified F(ab′)2 fragment, goat anti-mouse IgG (Fc-gamma fragment specific), diluted 1:100 in 50 μl PBS with 2% FCS (Dianova, Hamburg, FRG) is used. The samples are measured on a FACSscan (BD biosciences, Heidelberg, FRG).

[0906] Single clones are then analyzed for favourable properties and amino acid sequence. C-MET specific scFvs are converted into recombinant bispecific single chain antibodies by joining them via a Gly₄Ser₁-linker with the CD3 specific scFv I2C (SEQ ID: 185) or any other CD3 specific scFv of the invention to result in constructs with the domain arrangement VH_{C-MET}—(Gly₄Ser₁)₃—VL_{C-MET}—Ser₁Gly₄Ser₁—VHC_{D3}—(Gly₄Ser₁)₃—VL_{CD3} or alternative domain arrangements. For expression in CHO cells the coding sequences of (i) an N-terminal immunoglobulin heavy chain leader comprising a start codon embedded within a Kozak consensus sequence and (ii) a C-terminal Hise-tag followed by a stop codon are both attached in frame to the nucleotide sequence encoding the bispecific single chain antibodies prior to insertion of the resulting DNA-fragment as obtained by gene synthesis into the multiple cloning site of the expression vector pEF-DHFR (Raum et al. Cancer Immunol Immunother 50 (2001) 141-150). Transfection of the generated expression plasmids, protein expression and purification of cross-species specific bispecific antibody constructs are performed as described in Examples 26.3 and 26.4. All other state of the art procedures are carried out according to standard protocols (Sambrook, Molecular Cloning; A Laboratory Manual, 3rd edition, Cold Spring Harbour Laboratory Press, Cold Spring Harbour, New York (2001)).

[0907] Identification of functional bispecific single-chain antibody constructs is carried out by flow cytometric binding analysis of culture supernatant from transfected cells expressing the cross-species specific bispecific antibody constructs. Analysis is perfomed as described in Example 26.5 except that in addition C-MET transfected CHO cells as described in examples 26.1 and 26.2 are used.

[0908] Only those constructs showing bispecific binding to human and macaque CD3 as well as to C-MET are selected for further use.

[0909] Cytotoxic activity of the generated cross-species specific bispecific single chain antibody constructs against C-MET positive target cells elicited by effector cells is analyzed as described in Example 26.6 except that in addition C-MET transfected CHO cells as described in examples 26.1 and 26.2 are used as target cells and the macaque T cell line 4119LnPx is used as effector cells. Only those constructs showing potent recruitment of cytotoxic activity of effector cells against cells positive for C-MET are selected for further use.

27. Generation and Characterization of Additional cMET and CD3 Cross-Species Specific Bispecific Single Chain Molecules
27.1 Generation of CHO Cells with Enhanced Expression of Human cMET and CHO Cells with Enhanced Expression of Macaque cMET Extracellular Domains

[0910] The modified coding sequences of human cMET and macaque cMET as described above were used for the construction of artificial cDNA sequences encoding fusion proteins of the extracellular domains of human cMET and macaque cMET, respectively, with a truncated variant of human EpCAM. To generate a construct for expression of these cMET fusion proteins cDNA fragments were obtained by gene synthesis according to standard protocols (the cDNA and amino acid sequence of the constructs is listed under SEQ ID NOs 767 and 777 for human cMET and SEQ ID NOs 788 and 789 for macaque cMET). The gene synthesis fragments were designed as to contain first a Kozak site for eukaryotic expression of the construct, followed by the coding sequence of a 19 amino acid immunoglobulin leader peptide, followed in frame by the the coding sequence of the human cMET or macaque cMET protein from amino acid 1 to 908 of the mature protein corresponding to the extracellular domains of human cMET and macaque cMET, respectively, followed in frame by the coding sequence of an artificial Ser₁-Gly₄-Ser₁-Gly₁-linker, followed in frame by the coding sequence of the transmembrane domain and intracellular domain of human EpCAM (as published in GenBank; Accession number NM_002354; amino acids 266 to 314 [as counted from the start codon] except for a point mutation at position 279 with isoleucine instead of valine) and a stop codon. The gene synthesis fragments were also designed as to introduce restriction sites at the beginning and at the end of the fragment. The introduced restriction sites, EcoRI at the 5′ end and SaII at the 3′ end, were utilized in the following cloning procedures. The gene synthesis fragments were cloned via EcoRI and SaII into a plasmid designated pEF-DHFR (pEF-DHFR is described in Raum et al. Cancer Immunol Immunother 50 (2001) 141-150) following standard protocols. Clones with sequence-verified nucleotide sequence were transfected into DHFR deficient CHO cells for eukaryotic expression of the constructs. Eukaryotic protein expression in DHFR deficient CHO cells was performed as described by Kaufmann R. J. (1990) Methods Enzymol. 185, 537-566. Gene amplification of the constructs was induced by increasing concentrations of methotrexate (MTX) to a final concentration of up to 20 nM MTX.

27.2 Generation of cMET and CD3 Cross-Species Specific Bispecific Single Chain Molecules

### Cloning of Cross-Species Specific Binding Molecules

[0911] Bispecific single chain antibody molecules, with a binding specificity cross-species specific for human and non-chimpanzee primate CD3epsilon as well as a binding specificity cross-species specific for human and non-chimpanzee primate cMET, were designed as set out in the following Table 10:

TABLE 10
Formats of anti-CD3 and anti-cMET cross-species specific
bispecific single chain antibody molecules

| SEQ ID (nucl/prot) | Formats of protein constructs (N → C) |
|---|---|
| 1413/1412/ | ME86H11HL × I2CHL |
| 1427/1426/ | ME62A12HL × I2CHL |
| 1441/1440 | ME63F2HL × I2CHL |
| 1455/1454 | ME62D11HL × I2CHL |
| 1469/1468 | ME62C10HL × I2CHL |
| 1483/1482 | ME62A4HL × I2CHL |

[0912] Generation, expression and purification of these cross-species specific bispecific single chain molecules was performed as described above.

[0913] The flow cytometric binding analysis of the cMET and CD3 cross-species specific bispecific antibodies was performed as described above. The bispecific binding of the single chain molecules listed above, which are cross-species specific for cMET and cross-species specific for human and non-chimpanzee primate CD3 was clearly detectable as shown in FIG. 54. In the FACS analysis all constructs showed binding to CD3 and cMET compared to the negative control. Cross-species specificity of the bispecific antibodies to human and macaque CD3 and cMET antigens was demonstrated. Analysis of bioactivity by chromium 51 (⁵¹Cr) release in vitro cytotoxicity assays is performed as described above. Based on demonstrated cross-species specific bispecific binding and recruited cytotoxicity cross-species specific binding molecules are selected for further use.

27.3 Generation and Flow Cytometric Binding Analysis of Cross-Species Specific Single Chain Antibody Fragments (scFv) Binding to cMET

[0914] scFv cross-species specific for cMET were generated as described above and designated as set out in the following Table 11:

TABLE 11
Designation of cross-species specific
single chain antibody fragments

| SEQ ID (nucl/prot) | Designation |
|---|---|
| 1649/1648 | ME06F2HL |
| 1635/1634 | ME06E10HL |
| 1621/1620 | ME06D2HL |
| 1607/1606 | ME06D1HL |
| 1579/1578 | ME06C7HL |
| 1565/1564 | ME06C6HL |
| 1593/1592 | ME06B7HL |
| 1551/1550 | ME05F6HL |
| 1523/1522 | ME05D7HL |
| 1537/1536 | ME05B7HL |
| 1509/1508 | ME99B1HL |
| 1495/1494 | ME75H6HL |

[0915] The flow cytometric binding analysis of periplasmic preparations containing scFv cross-species specific for cMET using CHO cells expressing human cMET as described in Example 27.1 and CHO cells expressing macaque cMET as described in Example 27.1 was performed as described above. The binding of the scFv listed above, which are cross-species specific for cMET was clearly detectable as shown in FIG. 56. In the FACS analysis all constructs showed binding to cMET compared to the negative control. Cross-species specificity of the scFv antibodies to human and macaque cMET antigens was demonstrated.

[0916] Cloning of cross-species specific binding molecules based on the scFvs and expression and purification of these cross-species specific bispecific single chain molecules is performed as described above. Flow cytometric analysis of cross-species specific bispecific binding and analysis of bioactivity by chromium 51 (⁵¹Cr) release in vitro cytotoxicity assays is performed as described above. Based on demonstrated cross-species specific bispecific binding and recruited cytotoxicity cross-species specific binding molecules are selected for further use.

[0917] Human/humanized equivalents of non-human scFvs cross-species specific for cMET contained in the selected cross-species specific bispecific single chain molecules are generated as described herein. Cloning of cross-species specific binding molecules based on these human/humanized scFvs and expression and purification of these cross-species specific bispecific single chain molecules is performed as described above. Flow cytometric analysis of cross-species specific bispecific binding and analysis of bioactivity by chromium 51 (⁵¹Cr) release in vitro cytotoxicity assays is performed as described above. Based on demonstrated cross-species specific bispecific binding and recruited cytotoxicity cross-species specific binding molecules are selected for further use.

### 28. Generation and Characterization of Endosialin and CD3 Cross-Species Specific Bispecific Single Chain Antibody Molecules

### 28.1 Generation of CHO Cells Expressing Human Endosialin

[0918] The coding sequence of human Endosialin as published in GenBank (Accession number NM_020404) was obtained by gene synthesis according to standard protocols. The gene synthesis fragment was designed as to contain first a Kozak site for eukaryotic expression of the construct, followed by the coding sequence of human Endosialin, followed in frame by the coding sequence of a FLAG tag and a stop codon (the cDNA and amino acid sequence of the construct is listed under SEQ ID Nos 913 and 914). The gene synthesis fragment was also designed as to introduce restriction sites at the beginning and at the end of the fragment. The introduced restriction sites, EcoRI at the 5′ end and Xbal at the 3′ end, were utilised in the following cloning procedures. The gene synthesis fragment was cloned via EcoRI and Xbal into a plasmid designated pEF-DHFR (pEF-DHFR is described in Raum et al. Cancer Immunol Immunother 50 (2001) 141-150) following standard protocols. The aforementioned procedures were carried out according to standard protocols (Sambrook, Molecular Cloning; A Laboratory Manual, 3rd edition, Cold Spring Harbour Laboratory Press, Cold Spring Harbour, New York (2001)). A clone with sequence-verified nucleotide sequence was transfected into DHFR deficient CHO cells for eukaryotic expression of the construct. Eukaryotic protein expression in DHFR deficient CHO cells was performed as described by Kaufmann R. J. (1990) Methods Enzymol. 185, 537-566. Gene amplification of the construct was induced by increasing concentrations of methotrexate (MTX) to a final concentration of up to 20 nM MTX.

### 28.2 Generation of CHO Cells Expressing Macaque Endosialin

[0919] The cDNA sequence of macaque Endosialin was obtained by a set of 2 PCRs on cDNA from macaque monkey (cynomolgus) colon prepared according to standard protocols. The following reaction conditions: 1 cycle at 95° C. for 5 minutes followed by 40 cycles with 95° C. for 45 seconds, 50° C. for 45 seconds and 72° C. for 2 minutes followed by a terminal cycle of 72° C. for 5 minutes and the following primers were used for the first PCR:

forward primer:
SEQ ID NO 917
5′-atatgaattcgccaccatgctgctgcgcctgttgctggcc-3′
reverse primer:
SEQ ID NO 918
5′-gtcttcatcttcctcatcctcccc-3′

[0920] The following reaction conditions: 1 cycle at 95° C. for 5 minutes followed by 40 cycles with 95° C. for 45 seconds, 58° C. for 45 seconds and 72° C. for 2 minutes followed by a terminal cycle of 72° C. for 5 minutes and the following primers were used for the second PCR:

forward primer:
SEQ ID NO 919
5′-gtcaactacgttggtggcttcgagtg-3′
reverse primer:
SEQ ID NO 920
5′-ggtctagatcacttatcgtcatcatctttgtagtccacgctggtt
ctgcaggtctgc-3′

[0921] The PCR reactions were performed under addition of PCR grade betain to a final concentration of 1 M. Those PCRs generated two overlapping fragments, which were isolated and sequenced according to standard protocols using the PCR primers, and thereby provided a portion of the cDNA sequence coding macaque Endosialin from codon 9 of the leader peptide to codon 733 of the mature protein. To generate a construct for expression of macaque Endosialin a cDNA fragment was obtained by gene synthesis according to standard protocols (the cDNA and amino acid sequence of the construct is listed under SEQ ID Nos 915 and 916). In this construct the coding sequence of macaque Endosialin from amino acid 9 of the leader peptide to amino acid 733 of the mature Endosialin protein, followed in frame by the coding sequence of amino acid 734 to the last amino acid of the mature human Endosialin protein, followed in frame by the coding sequence of a FLAG tag and a stop codon was fused in frame to the coding sequence of the amino acids 1 to 8 of the leader peptide of the human Endosialin protein. The gene synthesis fragment was also designed as to contain a Kozak site for eukaryotic expression of the construct and restriction sites at the beginning and the end of the fragment containing the cDNA. The introduced restriction sites, EcoRI at the 5′ end and Xbal at the 3′ end, were utilised in the following cloning procedures. The gene synthesis fragment was cloned via EcoRI and Xbal into a plasmid designated pEF-DHFR (pEF-DHFR is described in Raum et al. Cancer Immunol Immunother 50 (2001) 141-150) following standard protocols. The aforementioned procedures were carried out according to standard protocols (Sambrook, Molecular Cloning; A Laboratory Manual, 3rd edition, Cold Spring Harbour Laboratory Press, Cold Spring Harbour, New York (2001)). A clone with sequence-verified nucleotide sequence was transfected into DHFR deficient CHO cells for eukaryotic expression of the construct. Eukaryotic protein expression in DHFR deficient CHO cells was performed as described by Kaufmann R. J. (1990) Methods Enzymol. 185, 537-566. Gene amplification of the construct was induced by increasing concentrations of methotrexate (MTX) to a final concentration of up to 20 nM MTX.

28.3 Cross-Species Specific Binding to Endosialin of a scFv-Antibody Fragment

[0922] The cDNA of a scFv-antibody fragment was obtained by gene synthesis according to standard protocols. The cDNA fragment was cloned via suitable restriction sites into the plasmid pComb3H5BFlag/His differing from the original pComb3H5BHis (described below) in that the expression construct (e.g. scFv) includes a Flag-tag (DYKDDDDK SEQ ID NO 933) between the scFv-fragment and the His6-tag and the additional phage proteins are deleted. After ligation, a sequence verified clone of the plasmid DNA was transformed into 100 μl heat shock competent E. coli TG1 or XLI blue and plated onto carbenicillin LB-agar. Single colonies were picked into 100 μl of LB carb (LB with 50 μg/ml carbenicillin).

[0923] After induction with 1 mM IPTG E. coli transformed with pComb3H5BFlag/His containing the coding sequence of the cross-species specific single-chain antibody produced soluble scFv in sufficient amounts. Due to a suitable signal sequence, the scFv-chain is exported into the periplasma where it folds into a functional conformation.

[0924] Single E. coli bacterial colonies from the transformation plates were picked for periplasmic small scale preparations and grown in SB-medium (e.g. 10 ml) supplemented with 20 mM MgCl₂ and carbenicillin 50 μg/ml (and re-dissolved in PBS (e.g. 1 ml) after harvesting. A temperature shock was applied by four rounds of freezing at −70° C. and thawing at 37° C. whereby the outer membrane of the bacteria is destroyed and the soluble periplasmic proteins including the scFv-molecules are released into the supernatant. After elimination of intact cells and cell-debris by centrifugation the supernatant containing the scFv-antibody fragment was collected and used in the subsequent flow cytometric binding analysis with the CHO cells transfected with human Endosialin as described in Example 28.1 and the macaque Endosialin transfectant described in Example 28.2.

[0925] To this end 200.000 cells of the respective cell lines were incubated for 30 min on ice with 50 μl of the periplasmic preparation containing the cross-species specific single-chain antibody. The cells were washed twice in PBS with 2% FCS and binding of the construct was detected with a murine Penta His antibody (Qiagen; diluted 1:20 in 50 μl PBS with 2% FCS). After washing, bound anti His antibodies were detected with an Fc gamma-specific antibody (Dianova) conjugated to phycoerythrin, diluted 1:100 in PBS with 2% FCS. Untransfected CHO cells were used as a negative control.

[0926] Flow cytometry was performed on a FACS-Calibur apparatus, the CellQuest software was used to acquire and analyze the data (Becton Dickinson biosciences, Heidelberg). FACS staining and measuring of the fluorescence intensity were performed as described in Current Protocols in Immunology (Coligan, Kruisbeek, Margulies, Shevach and Strober, Wiley-Interscience, 2002).

[0927] As shown in FIG. 46, specific binding of the scFv-antibody fragment to both, human and macaque Endosialin could be demonstrated compared to the negative control.

### 28.4 Generation of Endosialin and CD3 Cross-Species Specific Bispecific Single Chain Molecules

[0928] The human antibody germline VH sequence VH1 1-03 (http://vbase.mrccpe.cam.ac.uk/) is chosen as framework context for CDRH1 (SEQ ID 910), CDRH2 (SEQ ID 911) and CDRH3 (SEQ ID 912). For the human VH several degenerated oligonucleotides have to be synthesized that overlap in a terminal stretch of approximately 15-20 nucleotides. To this end every second primer is an antisense rimer. For VH1 1-03 the following set of oli onucleotides is used:

5′ED-VH-A-XhoI
SEQ ID NO 921
CCA GCT CTC GAG TCA GGA SCT GAG STG RWG AAG CCT
GGG GCT TCA GTG AAG RTG TCC TGC AAG GCT TCT GGA
TAC ACA TTC ACT
3′ED-VH-B
SEQ ID NO 922
AAT ATA TCC MAT CCA CTC AAG GCK CTK TCC AKK TSY
CTG CYT CAY CCA GTG TAT AAC ATA GTC AGT GAA TGT
GTA TCC AGA
5′ED-VH-C
SEQ ID NO 923
CTT GAG TGG ATK GGA TAT ATT AAT CCT TAT GAT GAT
GAT ACTA CC TAC AAC CAG AAG TTC AAG GGC
3′ED-VH-D
SEQ ID NO 924
T GAG CTS CAT GTA GGC TGT GYT GGM GGA TKT GWC TMS
AGT MAW TGT GRC CYG GCC CTT GAA CTT CTG GTT
5′ED-VH-E
SEQ ID NO 925
C ACA GCC TAC ATG SAA CTC ARC AGC CTG ASA TCT GAG
GAC ACT GCA GTC TAT TAC TGT GCA AGA AGG GGG
3′ED-VH-F-BstEII
SEQ ID NO 926
CCT GAT GGT GAC CAA GGT TCC TTG ACC CCA GTA GTC
CAT AGA ATA GTC GAA GTA ACC ATC ATA GGA GTT CCC
CCT TCT TGC ACA GTA

[0929] This primer set spans over the whole corresponding VH sequence.

[0930] Within the set primers are mixed in equal amounts (e.g. 1 μl of each primer (primer stocks 20 to 100 μM) to a 20 μl PCR reaction) and added to a PCR mix consisting of PCR buffer, nucleotides and Taq polymerase. This mix is incubated at 94° C. for 3 minutes, 65° C. for 1 minute, 62° C. for 1 minute, 59° C. for 1 minute, 56° C. for 1 minute, 52° C. for 1 minute, 50° C. for 1 minute and at 72° C. for 10 minutes in a PCR cycler. Subsequently the product is run in an agarose gel electrophoresis and the product of a size from 200 to 400 isolated from the gel according to standard methods.

[0931] The VH PCR product is then used as a template for a standard PCR reaction using primers that incorporate N-terminal and C-terminal suitable cloning restriction sites. The DNA fragment of the correct size (for a VH approximately 350 nucleotides) is isolated by agarose gel electrophoresis according to standard methods. In this way sufficient VH DNA fragment is amplified.

[0932] The human antibody germline VL sequence VkI L8 (http://vbase.mrc-cpe.cam.ac.uk/) is chosen as framework context for CDRL1 (SEQ ID 907), CDRL2 (SEQ ID 908) and CDRL3 (SEQ ID 909). For the human VL several degenerated oligonucleotides have to be synthesized that overlap in a terminal stretch of approximately 15-20 nucleotides. To this end every second primer is an antisense primer. Restriction sites needed for later cloning within the oligonucleotides are deleted. For VkI L8 the following oligonucleotides are used:

5′ED-VL-A-SacI
(SEQ ID NO 927)
CCA GTC GAG CTC CAG CTG ACC CAG TCT CMA ARM TTC
MTG TCC RCAT CA GTA GGA GAC AGA GTC NNS ATC ACC
TGC AGG GCC AG
3′ED-VL-B
(SEQ ID NO 928)
TCC TGG TTT CTG TTG ATA CCA GGC TAC AGC AGT ACC
CAC ATT CTG ACT GGC CCT GCA GGT GAT
5′ED-VL-C
(SEQ ID NO 929)
TAT CAA CAG AAA CCA GGA MAA KCC CCT AAA TTA CTG
ATT TACT CG GCA TCG AAT CGG TAC ACT GGA GTC CCT
3′ED-VL-D
(SEQ ID NO 930)
GCT GAT GGT GAG AGT GAA MTC TGT CCC AGA TCC ACT
GCC TGA GAA GCG AYY AGG GAC TCC AGT GTA CCG
5′ED-VL-E
(SEQ ID NO 931)
TTC ACT CTC ACC ATC AGC ART MTG CAG YCT GAA GAC
YTS GCA RMT TAT TWC TGC CAG CAA TAT ACC AAC
3′ED-VL-F-BsiWI/SpeI
(SEQ ID NO 932)
CCT GAT ACT AGT CGT ACG TTT TAT TTC CAG CTT GGT
CCC CTG TCC AAA CGT ATA CAT GGG ATA GTT GGT ATA
TTG CTG GCA

[0933] This primer set spans over the whole corresponding VL sequence.

[0934] Within the set primers are mixed in equal amounts (e.g. 1 μl of each primer (primer stocks 20 to 100 μM) to a 20 μl PCR reaction) and added to a PCR mix consisting of PCR buffer, nucleotides and Taq polymerase. This mix is incubated at 94° C. for 3 minutes, 65° C. for 1 minute, 62° C. for 1 minute, 59° C. for 1 minute, 56° C. for 1 minute, 52° C. for 1 minute, 50° C. for 1 minute and at 72° C. for 10 minutes in a PCR cycler. Subsequently the product is run in an agarose gel electrophoresis and the product of a size from 200 to 400 isolated from the gel according to standard methods.

[0935] The VL PCR product is then used as a template for a standard PCR reaction using primers that incorporate N-terminal and C-terminal suitable cloning restriction sites. The DNA fragment of the correct size (for a VL approximately 330 nucleotides) is isolated by agarose gel electrophoresis according to standard methods. In this way sufficient VL DNA fragment is amplified.

[0936] The final VH1 1-03-based VH PCR product (i.e. the repertoire of human/humanized VH) is then combined with the final VkI L8-based VL PCR product (i.e. the repertoire of human/humanized VL) in the phage display vector pComb3H5Bhis to form a library of functional scFvs from which—after display on filamentous phage—anti-Endosialin binders are selected, screened, identified and confirmed as described in the following:

[0937] 450 ng of the light chain fragments (Sacl-Spel digested) are ligated with 1400 ng of the phagemid pComb3H5Bhis (Sacl-Spel digested; large fragment). The resulting combinatorial antibody library is then transformed into 300 μl of electrocompetent Escherichia coli XL1 Blue cells by electroporation (2.5 kV, 0.2 cm gap cuvette, 25 μFD, 200 Ohm, Biorad gene-pulser) resulting in a library size of more than 10⁷ independent clones. After one hour of phenotype expression, positive transformants are selected for carbenicillin resistance encoded by the pComb3H5BHis vector in 100 ml of liquid super broth (SB)-culture over night. Cells are then harvested by centrifugation and plasmid preparation is carried out using a commercially available plasmid preparation kit (Qiagen).

[0938] 2800 ng of this plasmid-DNA containing the VL-library (Xhol-BstEII digested; large fragment) are ligated with 900 ng of the heavy chain V-fragments (Xhol-BstEII digested) and again transformed into two 300 μl aliquots of electrocompetent E. coli XL1 Blue cells by electroporation (2.5 kV, 0.2 cm gap cuvette, 25 PFD, 200 Ohm) resulting in a total VH-VL scFv (single chain variable fragment) library size of more than 10⁷ independent clones.

[0939] After phenotype expression and slow adaptation to carbenicillin, the E. coli cells containing the antibody library are transferred into SB-carbenicillin (SB with 50 μg/mL carbenicillin) selection medium. The E. coli cells containing the antibody library are then infected with an infectious dose of 10¹² particles of helper phage VCSM13 resulting in the production and secretion of filamentous M13 phage, wherein each phage particle contains single stranded pComb3H5BHis-DNA encoding a scFv-fragment and displays the corresponding scFv-protein as a translational fusion to phage coat protein Ill. This pool of phages displaying the antibody library is used for the selection of antigen binding entities.

[0940] For this purpose the phage library carrying the cloned scFv-repertoire is harvested from the respective culture supernatant by PEG8000/NaCl precipitation and centrifugation. Approximately 10¹¹ to 10¹² scFv phage particles are resuspended in 0.4 ml of PBS/0.1% BSA and incubated with 10⁵ to 10⁷ Endosialin transfected CHO cells (see example 28.1) for 1 hour on ice under slow agitation. These Endosialin transfected CHO cells are harvested beforehand by centrifugation, washed in PBS and resuspended in PBS/1% FCS (containing Na Azide). scFv phage which do not specifically bind to the Endosialin transfected CHO cells are eliminated by up to five washing steps with PBS/1% FCS (containing Na Azide). After washing, binding entities are eluted from the cells by resuspending the cells in HCl-glycine pH 2.2 (10 min incubation with subsequent vortexing) and after neutralization with 2 M Tris pH 12, the eluate is used for infection of a fresh uninfected E. coli XL1 Blue culture (OD600>0.5). The E. coli culture containing E. coli cells successfully transduced with a phagemid copy, encoding a human/humanized scFv-fragment, are again selected for carbenicillin resistance and subsequently infected with VCMS 13 helper phage to start the second round of antibody display and in vitro selection. A total of 4 to 5 rounds of selections are carried out, normally.

[0941] In order to screen for Endosialin specific binders plasmid DNA corresponding to 4 and 5 rounds of panning is isolated from E. coli cultures after selection. For the production of soluble scFv-protein, VH-VL-DNA fragments are excised from the plasmids (Xhol-Spel). These fragments are cloned via the same restriction sites into the plasmid pComb3H5BFlag/His differing from the original pComb3H5BHis in that the expression construct (e.g. scFv) includes a Flag-tag (DYKDDDDK) between the scFv and the His6-tag and the additional phage proteins are deleted. After ligation, each pool (different rounds of panning) of plasmid DNA is transformed into 100 μl heat shock competent E. coli TG1 or XLI blue and plated onto carbenicillin LB-agar. Single colonies are picked into 100 μl of LB carb (50 μg/ml).

[0942] After induction with 1 mM IPTG E. coli transformed with pComb3H5BFlag/His containing a VL-and VH-segment produce soluble scFv in sufficient amounts. Due to a suitable signal sequence, the scFv-chain is exported into the periplasma where it folds into a functional conformation.

[0943] Single E. coli TG1 bacterial colonies from the transformation plates are picked for periplasmic small scale preparations and grown in SB-medium (e.g. 10 ml) supplemented with 20 mM MgCl₂ and carbenicillin 50 μg/ml (and re-dissolved in PBS (e.g. 1 ml) after harvesting. A temperature shock is applied by four rounds of freezing at −70° C. and thawing at 37° C. whereby the outer membrane of the bacteria is destroyed and the soluble periplasmic proteins including the scFvs are released into the supernatant. After elimination of intact cells and cell-debris by centrifugation, the supernatant containing the anti-Endosialin scFvs is collected and used for the identification of Endosialin specific binders as follows:

[0944] Binding of scFvs to Endosialin is tested by flow cytometry on Endosialin transfected CHO cells (see example 28.1); untransfected CHO cells are use as negative control. For flow cytometry 2.5×10⁵ cells are incubated with 50 μl of scFv periplasmic preparation or with 5 μg/ml of purified scFv in 50 μl PBS with 2% FCS. The binding of scFv is detected with an anti-His antibody (Penta-His Antibody, BSA free, Qiagen GmbH, Hilden, FRG) at 2 μg/ml in 50 μl PBS with 2% FCS. As a second step reagent a R-Phycoerythrin-conjugated affinity purified F(ab′)2 fragment, goat anti-mouse IgG (Fc-gamma fragment specific), diluted 1:100 in 50 μl PBS with 2% FCS (Dianova, Hamburg, FRG) is used. The samples are measured on a FACSscan (BD biosciences, Heidelberg, FRG).

[0945] Single clones are then analyzed for favourable properties and amino acid sequence. Endosialin specific scFvs are converted into recombinant bispecific single chain antibodies by joining them via a Gly₄Ser₁-linker with the CD3 specific scFv I2C (SEQ ID NO: 185) or any other CD3 specific scFv of the invention to result in constructs with the domain arrangement VH Endosialin—(Gly₄Ser₁)₃—VL Endosialin—Ser₁ Gly₄Ser₁-VHCD3—(Gly₄Ser₁)₃—VLCD3 or alternative domain arrangements. For expression in CHO cells the coding sequences of (i) an N-terminal immunoglobulin heavy chain leader comprising a start codon embedded within a Kozak consensus sequence and (ii) a C-terminal His6-tag followed by a stop codon are both attached in frame to the nucleotide sequence encoding the bispecific single chain antibodies prior to insertion of the resulting DNA-fragment as obtained by gene synthesis into the multiple cloning site of the expression vector pEF-DHFR (Raum et al. Cancer Immunol Immunother 50 (2001) 141-150). A clone with sequence-verified nucleotide sequence is transfected into DHFR deficient CHO cells for eukaryotic expression of the construct. Eukaryotic protein expression in DHFR deficient CHO cells is performed as described by Kaufmann R. J. (1990) Methods Enzymol. 185, 537-566. Gene amplification of the construct is induced by increasing concentrations of methotrexate (MTX) to a final concentration of up to 20 nM MTX.

### 28.5 Expression and Purification of Bispecific Single Chain Antibody Molecules

[0946] Bispecific single chain antibody molecules are expressed in Chinese hamster ovary cells (CHO or HEK 293 cells as described herein above for the MCSP×CD3 bispecific single chain antibodies.

[0947] The isolation and analysis of the expressed bispecific single chain antibodies has also been described herein above in Example 9.

### 28.6 Flow Cytometric Binding Analysis of the Endosialin and CD3 Cross-Species Specific Bispecific Antibodies

[0948] In order to test the functionality of cross-species specific bispecific antibody constructs regarding the capability to bind to human and macaque Endosialin and CD3, respectively, a FACS analysis is performed. For this purpose CHO cells transfected with human Endosialin as described in Example 28.1 and the human CD3 positive T cell leukemia cell line HPB-ALL (DSMZ, Braunschweig, ACC483) are used to test the binding to human antigens. The binding reactivity to macaque antigens is tested by using the generated macaque Endosialin transfectant described in Example 28.2 and a macaque T cell line 4119LnPx (kindly provided by Prof Fickenscher, Hygiene Institute, Virology, Erlangen-Nuernberg; published in Knappe A, et al., and Fickenscher H., Blood 2000, 95, 3256-61). 200.000 cells of the respective cell lines are incubated for 30 min on ice with 50 μl of cell culture supernatant of transfected cells expressing the cross-species specific bispecific antibody constructs. The cells are washed twice in PBS with 2% FCS and binding of the construct is detected with a murine Penta His antibody (Qiagen; diluted 1:20 in 50 μl PBS with 2% FCS). After washing, bound anti His antibodies are detected with an Fc gamma-specific antibody (Dianova) conjugated to phycoerythrin, diluted 1:100 in PBS with 2% FCS. Supernatant of untransfected cells is used as a negative control. Flow cytometry is performed on a FACS-Calibur apparatus, the CellQuest software is used to acquire and analyze the data (Becton Dickinson biosciences, Heidelberg). FACS staining and measuring of the fluorescence intensity are performed as described in Current Protocols in Immunology (Coligan, Kruisbeek, Margulies, Shevach and Strober, Wiley-Interscience, 2002).

[0949] Only those constructs showing bispecific binding to human and macaque CD3 as well as to Endosialin are selected for further use.

[0950] 28.7 Bioactivity of Endosialin and CD3 Cross-Species Specific Bispecific Single Chain Antibodies

[0951] Bioactivity of generated bispecific single chain antibodies is analyzed by chromium 51 (⁵¹Cr) release in vitro cytotoxicity assays using the CHO cells transfected with human Endosialin described in Example 28.1 and the CHO cells transfected with macaque Endosialin described in Example 28.2. As effector cells stimulated human CD4/CD56 depleted PBMC or the macaque T cell line 4119LnPx are used, respectively.

[0952] The generation of stimulated human PBMC was described herein above in Example 11.

[0953] Target cells prepared and the assay was performed in analogy to the procedure described for the MCSP×CD3 bispecific single chain antibodies in example 11.

[0954] Only those constructs showing potent recruitment of cytotoxic activity of effector cells against cells positive for Endosialin are selected for further use.

### 29. Generation and Characterization of CD248 (Endosialin) and CD3 Cross-Species Specific Bispecific Single Chain Molecules

### 29.1 Generation of CD248 and CD3 Cross-Species Specific Bispecific Single Chain Molecules

### Cloning of Cross-Species Specific Binding Molecules

[0955] Bispecific single chain antibody molecules, with a binding specificity cross-species specific for human and non-chimpanzee primate CD3epsilon as well as a binding specificity cross-species specific for human and non-chimpanzee primate CD248, were designed as set out in the following Table 13:

TABLE 13
Formats of anti-CD3 and anti-CD248 cross-species specific
bispecific single chain antibody molecules

| SEQ ID (nucl/prot) | Formats of protein constructs (N → C) |
|---|---|
| 1665/1664 | EN00B12HL × I2CHL |
| 1679/1678 | EN00C3HL × I2CHL |
| 1693/1692 | EN01D5HL × I2CHL |
| 1707/1706 | EN00E4HL × I2CHL |
| 1721/1720 | EN0OF7HL × I2CHL |
| 1735/1734 | EN00H6HL × I2CHL |

[0956] Generation, expression and purification of these cross-species specific bispecific single chain molecules was performed as described above.

[0957] The flow cytometric binding analysis of the CD248 and CD3 cross-species specific bispecific antibodies was performed as described above. The bispecific binding of the single chain molecules listed above, which are cross-species specific for CD248 and cross-species specific for human and non-chimpanzee primate CD3 was clearly detectable as shown in FIG. 58. In the FACS analysis all constructs showed binding to CD3 and CD248 compared to the negative control. Cross-species specificity of the bispecific antibodies to human and macaque CD3 and CD248 antigens was demonstrated.

[0958] Bioactivity of the generated bispecific single chain antibodies was analyzed by chromium 51 (⁵¹Cr) release in vitro cytotoxicity assays as described above. As shown in FIG. 59 all of the generated cross-species specific bispecific single chain antibody constructs demonstrated cytotoxic activity against human CD248 positive target cells elicited by stimulated human CD4/CD56 depleted PBMC and macaque CD248 positive target cells elicited by the macaque T cell line 4119LnPx.

### 30. Generation and Characterization of EpCAM and CD3 Cross-Species Specific Bispecific Single Chain Antibody Molecules

### 30.1 Cloning and Expression of Human EpCAM Antigen on CHO Cells

[0959] The sequence of the human EpCAM antigen ('NM_002354, Homo sapiens tumor-associated calcium signal transducer 1 (TACSTD1), mRNA, National Center for Biotechnology Information, http://www.ncbi.nlm.nih.gov/entrez) was used to obtain a synthetic molecule by gene synthesis according to standard protocols. The gene synthesis fragment was also designed as to contain a Kozak site for eukaryotic expression of the construct and and restriction sites at the beginning and the end of the DNA. The introduced restriction sites Xbal at the 5′ end and SaII at the 3′ end were utilised during the cloning step into the expression plasmid designated pEFDHFR as described in Raum et al. (loc cit.). After sequence verification the plasmid was used to transfect CHO/dhfr-cells as follows. A sequence verified plasmid was used to transfect CHO/dhfr-cells (ATCC No. CRL 9096; cultivated in RPMI 1640 with stabilized glutamine obtained from Biochrom AG Berlin, Germany, supplemented with 10% FCS, 1% penicillin/streptomycin all obtained from Biochrom AG Berlin, Germany and nucleosides from a stock solution of cell culture grade reagents obtained from Sigma-Aldrich Chemie GmbH, Taufkirchen, Germany, to a final concentration of 10 μg/ml Adenosine, 10 μg/ml Deoxyadenosine and 10 μg/ml Thymidine, in an incubator at 37° C., 95% humidity and 7% CO₂). Transfection was performed using the PolyFect Transfection Reagent (Qiagen GmbH, Hilden, Germany) and 5 μg of plasmid DNA according to the manufacturer's protocol. After culturing for 24 hours cells were washed once with PBS and again cultured in the aforementioned cell culture medium except that the medium was not supplemented with nucleosides and dialysed FCS (obtained from Biochrom AG Berlin, Germany) was used. Thus the cell culture medium did not contain nucleosides and thereby selection was applied on the transfected cells. Approximately 14 days after transfection the outgrowth of resistant cells was observed. After an additional 7 to 14 days the transfectants were tested positive for EpCAM-expression by FACS. Eukaryotic protein expression in DHFR deficient CHO cells was performed as described by Kaufmann R. J. (1990) Methods Enzymol. 185, 537-566. Gene amplification of the construct was induced by increasing concentrations of methothrexate (MTX) to a final concentration of up to 20 nM MTX.

### 30.2 Generation of EpCAM and CD3 Cross-Species Specific Bispecific Single Chain Molecules

[0960] Generally, bispecific single chain antibody molecules, each comprising a domain with a binding specificity for the human and the macaque CD3 antigen as well as a domain with a binding specificity for the human EPCAM antigen, were designed as set out in the following Table 14:

TABLE 14
Formats of anti-CD3 and anti-EpCAM cross-species specific
bispecific single chain antibody molecules

| SEQ ID (nucl/prot) | Formats of protein constructs (N → C) |
|---|---|
| 945/944 | Ep 5-10 LH × I2C HL |
| 949/948 | Ep 5-10 LH × F12Q HL |
| 947/946 | Ep 5-10 LH × H2C HL |
| 961/960 | hEp 14-A1 LH × I2C HL |
| 973/972 | hEp 14-D2 LH × I2C HL |
| 985/984 | hEp 14-H8 LH × I2C HL |
| 997/996 | hEp 14-A6 LH × I2C HL |
| 1009/1008 | hEp 14-D1 LH × I2C HL |
| 1033/1032 | hEp 14-H4 LH × I2C HL |
| 1045/1044 | hEp 17-A6 LH × I2C HL |
| 1057/1056 | hEp 17-E9 LH × I2C HL |
| 1079/1078 | hEp 18-E3 LH × I2C HL |
| 1091/1090 | hEp 18-F11 LH × I2C HL |
| 1103/1102 | hEp 18-F12 LH × I2C HL |
| 1115/1114 | hEp 18-G1 LH × I2C HL |
| 1127/1126 | hEp 18-G9 LH × I2C HL |
| 1021/1020 | hEp 14-G6 LH × I2C HL |
| 1777/1776 | hEp 18-A6 LH × I2C HL |

[0961] The aforementioned constructs containing the variable light-chain (L) and variable heavy-chain (H) domains specific for human EpCAM and the CD3 specific VH and VL combinations cross-species specific for human and macaque CD3 were obtained by gene synthesis. The gene synthesis fragments were designed and eukaryotic protein expression was performed in analogy to the procedure described in example 9 for the MCSP×CD3 cross-species specific single chain molecules.

### 30.3 Expression and Purification of the Single Domain Bispecific Single Chain Antibody Molecules

[0962] The single domain bispecific single chain antibody molecules were expressed in chinese hamster ovary cells (CHO) or HEK 293 cells as described herein above for the MCSP×CD3 bispecific single chain antibodies.

[0963] The isolation and analysis of the expressed bispecific single chain antibodies has also been described herein above in Example 9.

### 30.4 Flow Cytometric Binding Analysis of the EpCAM and CD3 Cross-Species Specific Bispecific Antibodies

[0964] In order to test the functionality of the cross-species specific bispecific antibody constructs with regard to binding capability to human EpCAM and human/macaque CD3, a FACS analysis was performed. For this purpose the CHO cells transfected with human EpCAM as described in Example 30.1 and human CD3 positive T cell leukemia cell line HPB-ALL (DSMZ, Braunschweig, ACC483) were used to check the binding to human antigens. The binding reactivity to macaque CD3 was tested by using a macaque T cell line 4119LnPx (kindly provided by Prof Fickenscher, Hygiene Institute, Virology, Erlangen-Nuernberg; Knappe A, et al., and Fickenscher H: Herpesvirus saimiri-transformed macaque T cells are tolerated and do not cause lymphoma after autologous reinfusion. Blood 2000; 95:3256-61.) 200,000 cells of the respective cell population were incubated for 30 min on ice with 50 μl of the purified protein of the cross-species specific bispecific antibody constructs (e. g. 2 μg/ml) Alternatively the cell culture supernatant of transiently produced proteins was used. The cells were washed twice in PBS and binding of the construct was detected with an unlabeled murine Penta His antibody (Qiagen; diluted 1:20 in 50 μl PBS with 2% FCS). After washing, bound anti His antibodies were detected with an Fc gamma-specific antibody (Dianova) conjugated to phycoerythrin, diluted 1:100 in 50 μl PBS with 2% FCS. Fresh culture medium was used as a negative control.

[0965] Flow cytometry was performed on a FACS-Calibur apparatus, the CellQuest software was used to acquire and analyze the data (Becton Dickinson biosciences, Heidelberg). FACS staining and measuring of the fluorescence intensity were performed as described in Current Protocols in Immunology (Coligan, Kruisbeek, Margulies, Shevach and Strober, Wiley-Interscience, 2002).

[0966] The binding ability of all EpCAM-directed bispecific single chain molecules were clearly detectable as shown in FIG. 60. In the FACS analysis, all constructs showed binding to human and macaque CD3 and to human EpCAM compared to the negative control using culture medium and 1, and 2. detection antibody. In summary, the cross-species specificity of the bispecific antibody to human and macaque CD3 and human EpCAM could clearly be demonstrated.

### 30.5 Bioactivity of EpCAM and CD3 Cross-Species Specific Bispecific Single Chain Antibodies

[0967] Bioactivity of the generated bispecific single chain antibodies was analyzed by chromium 51 release in vitro cytotoxicity assays using the EpCAM positive cell line described in example 30.1. As effector cells stimulated human CD8 positive T cells or the macaque T cell line 4119LnPx were used.

[0968] Stimulated CD8+ T cells were obtained as follows:

[0969] The generation of stimulated human PBMC was described herein above in Example 11.

[0970] Target cells prepared and the assay was performed in analogy to the procedure described for the MCSP×CD3 bispecific single chain antibodies in example 11.

[0971] As shown in FIGS. 61 to 66, all of the indicated cross-species specific bispecific single chain antibody constructs revealed cytotoxic activity against human EpCAM positive target cells elicited by human CD8+ cells and against human EpCAM positive target cells elicited by the macaque T cell line 4119LnPx. As a negative control, an irrelevant bispecific single chain antibody was used.

### 30.6 Cloning and Expression of Murine EpCAM Antigen and a Human-Murine EpCAM Hybrid Antigen on CHO Cells

[0972] The sequence of the mouse EpCAM antigen ('NM 008532, Mus musculus tumor-associated calcium signal transducer 1 (Tacstd1), mRNA., National Center for Biotechnology Information, http://www.ncbi.nlm.nih.gov/entrez) was used to obtain a synthetic molecule by gene synthesis according to standard protocols. The gene synthesis fragment was also designed as to contain a Kozak site for eukaryotic expression of the construct and restriction sites at the beginning and the end of the DNA. The introduced restriction sites Xbal at the 5′ end and SaII at the 3′ end were utilised during the cloning step into the expression plasmid designated pEFDHFR. After sequence verification the plasmid was used to transfect CHO/DHFR-cells as described in example 30.1. The human-murine EpCAM hybrid antigen was generated by exchanging the murine Exon 2 (amino acids no 26-61) for the human Exon 2 amino acids to enable the identification of the epitopes recognised by the cross-species specific bispecific antibody constructs. The deduced sequence was used to obtain a synthetic molecule by gene synthesis and CHO cells were transfected as described above.

### 30.7 Flow Cytometric Binding Analysis of the EpCAM and CD3 Cross-Species Specific Bispecific Antibodies to Different EpCAM Antigens

[0973] In order to analyze the binding ability of the cross-species specific bispecific antibody constructs with regard to binding abilities to different epitopes on human or murine or on a human-mouse hybrid EpCAM, a FACS flow cytometry was performed. For this purpose the CHO cells transfected with human EpCAM as described in example 1, Cho cells transfected with murine EpCAM (example 30.6) and CHO cells transfected with a human-mouse EpCAM hybrid (example 30.6) were used to check the different binding patterns. 200,000 cells of the respective cell population were incubated for 30 min on ice with 50 μl of the cell culture supernatant of transiently produced proteins. The cells were washed twice in PBS and binding of the construct was detected with an unlabeled murine Penta His antibody (Qiagen; diluted 1:20 in 50 μl PBS with 2% FCS). After washing, bound anti His antibodies were detected with an Fc gamma-specific antibody (Dianova) conjugated to phycoerythrin, diluted 1:100 in 50 μl PBS with 2% FCS. Fresh culture medium was used instead of cell culture supernatant from CHO cells transfected with the respective bispecific single chain antibody molecules as a negative control. As positive control for the expression of the murine EpCAM the detection with a rat derived unlabeled antibody specific for murine EpCAM (BD Pharmingen, #552370, Rat IgG2a,k) followed by PE labelled anti Rat IgG2a, κ specific antibody (BD Pharmingen, Heidelberg, #553930) was used.

[0974] Flow cytometry was performed on a FACS-Calibur apparatus, the CellQuest software was used to acquire and analyze the data (Becton Dickinson biosciences, Heidelberg). FACS staining and measuring of the fluorescence intensity were performed as described in Current Protocols in Immunology (Coligan, Kruisbeek, Margulies, Shevach and Strober, Wiley-Interscience, 2002). For the purpose of comparison the median values of the fluorescence intensity was used to generate a bar chart.

[0975] The binding ability of all EpCAM-directed bispecific single chain molecules to CHO cells transfected with human EpCAM was clearly detectable as shown in FIG. 67. None of the human EpCAM specific molecules elicited a median value significantly above the negative control when binding to murine EpCAM was analysed. The binding properties of the human EpCAM specific single chain bispecific antibody molecules to human-mouse EpCAM hybrid antigen revealed two subsets of molecules: Those without a detectable binding to the human-mouse EpCAM hybrid antigen (HD69 HL× I2C HL) and those with a median fluorescence intensity nearly at the level of the binding strength to the human EpCAM antigen (hEp 14-A1 LH×I2C HL; hEp 14-H8 LH×I2C HL; hEp 14-A6 LH×I2C HL; hEp 14-D1 LH×I2C HL; hEp 14-H4 LH×I2C HL; hEp 17-A6 LH×I2C HL; hEp 17-E9 LH×I2C HL; hEp 18-E3 LH×I2C HL; hEp 18-F11 LH×I2C HL; hEp 18-F12 LH×I2C HL; hEp 18-G1 LH×I2C HL; hEp 18-G9 LH×I2C HL; for SEQ ID NOs of the constructs see table 14). The divergent binding patterns of these two subsets of human EpCAM specific single chain bispecific antibody molecules demonstrate different epitopes on the human EpCAM antigen. Transplantation of the human EpCAM Exon 2 domain into the backbone of murine EpCAM led to gain of binding by the EpCAM-directed bispecific single chain molecules of this invention but not by the HD69 HL× I2C HL molecule. Thus, the second binding domain of the EpCAM-CD3 bispecific single chain antibody of the invention binds to an epitope localized in amino acid residues 26 to 61 of the EGF-like domain 1 of EpCAM which is encoded by Exon 2 of the EpCAM gene. Said amino acid residues 26 to 61 of the EGF-like domain 1 of human EpCAM encoded by exon 2 of the EpCAM gene are shown in SEQ ID NO. 1130.

[0976] Accordingly the epitope of the EpCAM-directed bispecific single chain molecules of this invention is mapped to the Exon 2 region of human EpCAM, while other regions of EpCAM participate in forming the epitope of the HD69 HL× I2C HL molecule. Thus, the EpCAM-directed bispecific single chain molecules of this invention form a unique own class of EpCAM-binding molecules, that is clearly differentiated from former EpCAM-binding molecules based on the EpCAM-binder HD69.

### 31. Generation and Characterization of FAP Alpha and CD3 Cross-Species Specific Bispecific Single Chain Antibody Molecules

### 31.1 Generation of CHO Cells Expressing Human FAP Alpha

[0977] The coding sequence of human FAPalpha as published in GenBank (Accession number NM_004460) was obtained by gene synthesis according to standard protocols. The gene synthesis fragment was designed as to contain first a Kozak site for eukaryotic expression of the construct, followed by the coding sequence of the human FAPalpha protein and a stop codon (the cDNA and amino acid sequence of the construct is listed under SEQ ID NOs. 1149 and 1150). The gene synthesis fragment was also designed as to introduce restriction sites at the beginning and at the end of the fragment. The introduced restriction sites, Xmal at the 5′ end and SaII at the 3′ end, were utilised in the following cloning procedures. The gene synthesis fragment was cloned via Xmal and SaII into a plasmid designated pEF-DHFR (pEF-DHFR is described in Raum et al. Cancer Immunol Immunother 50 (2001) 141-150) following standard protocols. The aforementioned procedures were carried out according to standard protocols (Sambrook, Molecular Cloning; A Laboratory Manual, 3rd edition, Cold Spring Harbour Laboratory Press, Cold Spring Harbour, New York (2001)). A clone with sequence-verified nucleotide sequence was transfected into DHFR deficient CHO cells for eukaryotic expression of the construct. Eukaryotic protein expression in DHFR deficient CHO cells was performed as described by Kaufmann R. J. (1990) Methods Enzymol. 185, 537-566. Gene amplification of the construct was induced by increasing concentrations of methotrexate (MTX) to a final concentration of up to 20 nM MTX.

### 31.2 Generation of CHO Cells Expressing Macaque FAP Alpha

[0978] The cDNA sequence of macaque FAP alpha (Cynomolgus) was obtained by a set of four PCRs on cDNA from macaque monkey skin prepared according to standard protocols. The following reaction conditions: 1 cycle at 94° C. for 3 minutes followed by 40 cycles with 94° C. for 0.5 minutes, 56° C. for 0.5 minutes and 72° C. for 3 minutes followed by a terminal cycle of 72° C. for 3 minutes and the following primers were used:

forward primer:
(SEQ ID NO. 1153)
5′-cagcttccaactacaaagacagac-3′
reverse primer:
(SEQ ID NO. 1154)
5′-tttcctcttcataaacccagtctgg-3′
forward primer:
(SEQ ID NO. 1155)
5′-ttgaaacaaagaccaggagatccacc-3′
reverse primer:
(SEQ ID NO. 1156)
5′-agatggcaagtaacacacttcttgc-3′
forward primer:
(SEQ ID NO. 1157)
5′-gaagaaacatctacagaattagcattgg-3′
reverse primer:
(SEQ ID NO. 1158)
5′-cacatttgaaaagaccagttccagatgc-3′
forward primer:
(SEQ ID NO. 1159)
5′-agattacagctgtcagaaaattcatagaaatgg-3′
reverse primer:
(SEQ ID NO. 1160)
5′-atataaggttttcagattctgatacaggc-3′

[0979] These PCRs generated four overlapping fragments, which were isolated and sequenced according to standard protocols using the PCR primers, and thereby provided the cDNA sequence coding macaque FAPalpha. To generate a construct for expression of macaque FAPalpha a cDNA fragment was obtained by gene synthesis according to standard protocols (the cDNA and amino acid sequence of the construct is listed under SEQ ID NOs. 1151 and 1152). This construct contains the complete coding sequence of macaque FAPalpha followed by a stop codon. The gene synthesis fragment was also designed as to contain a Kozak site for eukaryotic expression of the construct and restriction sites at the beginning and the end of the fragment containing the cDNA. The introduced restriction sites, EcoRI at the 5′ end and SaII at the 3′ end, were utilised in the following cloning procedures. The gene synthesis fragment was cloned via EcoRI and SaII into a plasmid designated pEF-DHFR (pEF-DHFR is described in Raum et al. Cancer Immunol Immunother 50 (2001) 141-150) following standard protocols. The aforementioned procedures were carried out according to standard protocols (Sambrook, Molecular Cloning; A Laboratory Manual, 3rd edition, Cold Spring Harbour Laboratory Press, Cold Spring Harbour, New York (2001)). A clone with sequence-verified nucleotide sequence was transfected into DHFR deficient CHO cells for eukaryotic expression of the construct. Eukaryotic protein expression in DHFR deficient CHO cells was performed as described by Kaufmann R. J. (1990) Methods Enzymol. 185, 537-566. Gene amplification of the construct was induced by increasing concentrations of methotrexate (MTX) to a final concentration of up to 20 nM MTX.

### 31.3 Generation of FAP Alpha and CD3 Cross-Species Specific Bispecific Single Chain Molecules

### Cloning of Cross-Species Specific Binding Molecules

[0980] Generally, bispecific single chain antibody molecules, each comprising a domain with a binding specificity cross-species specific for human and non-chimpanzee primate CD3 epsilon as well as a domain with a binding specificity cross-species specific for human and non-chimpanzee primate FAP alpha, were designed as set out in the following Table 15:

TABLE 15
Formats of anti-CD3 and anti-FAP alpha cross-species
specific bispecific single chain antibody molecules

| SEQ ID NO. (nucl/prot) | Formats of protein constructs (N → C) |
|---|---|
| 1144/1143 | FAPA-1 LH × I2C HL |
| 1148/1147 | FAPA-1 LH × F12Q HL |
| 1146/1145 | FAPA-1 LH × H2C HL |

[0981] The aforementioned constructs containing the variable light-chain (L) and variable heavy-chain (H) domains cross-species specific for human and macaque FAP alpha and the CD3 specific VH and VL combinations cross-species specific for human and macaque CD3 were obtained by gene synthesis. The gene synthesis fragments were designed and eukaryotic protein expression was performed in analogy to the procedure described in example 9 for the MCSP×CD3 cross-species specific single chain molecules.

### 31.4 Expression and Purification of the Bispecific Single Chain Antibody Molecules

[0982] The bispecific single chain antibody molecules were expressed in Chinese hamster ovary cells (CHO) or HEK 293 cells as described herein above for the MCSP×CD3 bispecific single chain antibodies.

[0983] The isolation and analysis of the expressed bispecific single chain antibodies has also been described herein above in Example 9.

### 31.5 Flow Cytometric Binding Analysis of the FAP Alpha and CD3 Cross-Species Specific Bispecific Antibodies

[0984] In order to test the functionality of the cross-species specific bispecific antibody constructs regarding the capability to bind to human and macaque FAPalpha and CD3, respectively, a FACS analysis was performed. For this purpose CHO cells transfected with human FAPalpha as described in Example 31.1 and the human CD3 positive T cell leukemia cell line HPB-ALL (DSMZ, Braunschweig, ACC483) were used to test the binding to human antigens. The binding reactivity to macaque antigens was tested by using the generated macaque FAPalpha transfectant described in Example 31.2 and a macaque T cell line 4119LnPx (kindly provided by Prof Fickenscher, Hygiene Institute, Virology, Erlangen-Nuernberg; published in Knappe A, et al., and Fickenscher H., Blood 2000, 95, 3256-61). 200.000 cells of the respective cell lines were incubated for 30 min on ice with 50 μl of cell culture supernatant of transfected cells expressing the cross-species specific bispecific antibody constructs. The cells were washed twice in PBS with 2% FCS and binding of the construct was detected with a murine Penta His antibody (Qiagen; diluted 1:100 in 50 μl PBS with 2% FCS). After washing, bound anti His antibodies were detected with an Fc gamma-specific antibody (Dianova) conjugated to phycoerythrin, diluted 1:100 in PBS with 2% FCS. Supernatant of untransfected cells was used as a negative control.

[0985] Flow cytometry was performed on a FACS-Calibur apparatus, the CellQuest software was used to acquire and analyze the data (Becton Dickinson biosciences, Heidelberg). FACS staining and measuring of the fluorescence intensity were performed as described in Current Protocols in Immunology (Coligan, Kruisbeek, Margulies, Shevach and Strober, Wiley-Interscience, 2002).

[0986] The bispecific binding of the single chain molecules listed above, which are cross-species specific for FAPalpha and cross-species specific for human and non-chimpanzee primate CD3 was clearly detectable as shown in FIG. 68. In the FACS analysis all constructs showed binding to CD3 and FAPalpha compared to the negative control. Cross-species specificity of the bispecific antibodies to human and macaque CD3 and FAPalpha antigens was demonstrated.

### 31.6 Bioactivity of FAPalpha and CD3 Cross-Species Specific Bispecific Single Chain Antibodies

[0987] Bioactivity of the generated bispecific single chain antibodies was analyzed by chromium 51 (⁵¹Cr) release in vitro cytotoxicity assays using the CHO cells transfected with human FAPalpha described in Example 31.1 and the CHO cells transfected with macaque FAPalpha described in Example 31.2. As effector cells stimulated human CD4/CD56 depleted PBMC or the macaque T cell line 4119LnPx were used, respectively.

[0988] The generation of stimulated human PBMC was described herein above in Example 11.

[0989] Target cells prepared and the assay was performed in analogy to the procedure described for the MCSP×CD3 bispecific single chain antibodies in example 11.

[0990] As shown in FIG. 69 all of the generated cross-species specific bispecific single chain antibody constructs demonstrated cytotoxic activity against human FAPalpha positive target cells elicited by stimulated human CD4/CD56 depleted PBMC and macaque FAPalpha positive target cells elicited by the macaque T cell line 4119LnPx.

### 31.7 Generation of Additional FAP Alpha and CD3 Cross-Species Specific Bispecific Single Chain Antibody Molecules

[0991] The human antibody germline VH sequence VH1 1-03 (http://vbase.mrccpe.cam.ac.uk/) is chosen as framework context for CDRH1 (SEQ ID NO. 1137), CDRH2 (SEQ ID NO. 1138) and CDRH3 (SEQ ID NO. 1139). For the human VH several degenerated oligonucleotides have to be synthesized that overlap in a terminal stretch of approximately 15-20 nucleotides. To this end every second primer is an antisense primer. For VH1 1-03 the following oligonucleotides are used:

5′FAP-VH-A-XhoI
(SEQ ID NO. 1161)
CCG CTA CTC GAG TCT GGA SCT GAG STG RWG AAG CCT
GGG GCT TCA GTA AAG
3′FAP-VH-B
(SEQ ID NO. 1162)
CTG TCT CAC CCA GTG TAT GGT GTA TTC AGT GAA TGT
GTA TCY AGA AGY CTT GCA GGA CAY CTT TAC TGA AGC
CCC
5′FAP-VH-C
(SEQ ID NO. 1163)
CAC TGG GTG AGA CAG KCC CMT GGA MAG AGM CTT GAG
TGG ATK GGA GGT ATT AAT CCT AAC AAT GGT ATT CCT
AAC TAC
3′FAP-VH-D
(SEQ ID NO. 1164)
CAT GTA GGC GGT GCT GGM GGA CKT GYC TMY AGT TAW
TGT GRC CCT GCC CTT GAA CTT CTG ATT GTA GTT AGG
AAT ACC
5′FAP-VH-E
(SEQ ID NO. 1165)
AGC ACC GCC TAC ATG GAG CTC MGC AGC CTG ASA TCT
GAG GAT ACT GCG GTC TAT TWC TGT GCA AGA AGA AGA
ATC GCC
3′FAP-VH-F-BstEII
(SEQ ID NO. 1166)
CCA GTA GGT GAC CAG GGT TCC TTG ACC CCA GTA GTC
CAT AGC ATG GCC CTC GTC GTA ACC ATA GGC GAT TCT
TCT TCT TGC ACA

[0992] This primer set spans over the whole corresponding VH sequence.

[0993] Within the set primers are mixed in equal amounts (e.g. 1 μl of each primer (primer stocks 20 to 100 μM) to a 20 μl PCR reaction) and added to a PCR mix consisting of PCR buffer, nucleotides and Taq polymerase. This mix is incubated at 94° C. for 3 minutes, 65° C. for 1 minute, 62° C. for 1 minute, 59° C. for 1 minute, 56° C. for 1 minute, 52° C. for 1 minute, 50° C. for 1 minute and at 72° C. for 10 minutes in a PCR cycler. Subsequently the product is run in an agarose gel electrophoresis and the product of a size from 200 to 400 isolated from the gel according to standard methods.

[0994] The VH PCR product is then used as a template for a standard PCR reaction using primers that incorporate N-terminal and C-terminal suitable cloning restriction sites. The DNA fragment of the correct size (for a VH approximately 350 nucleotides) is isolated by agarose gel electrophoresis according to standard methods. In this way sufficient VH DNA fragment is amplified.

[0995] The human antibody germline VL sequence Vkll O 11 (http://vbase.mrccpe.cam.ac.uk/) is chosen as framework context for CDRL1 (SEQ ID NO. 1132), CDRL2 (SEQ ID NO. 1133) and CDRL3 (SEQ ID NO. 1134). For this human VL several degenerated oligonucleotides have to be synthesized that overlap in a terminal stretch of approximately 15-20 nucleotides. To this end every second primer is an antisense primer. Restriction sites needed for later cloning within the oligonucleotides are deleted. For Vkll O 11 the following oligonucleotides are used:

5′FAP-VL-A-SacI
(SEQ ID NO. 1167)
CGA CCT GAG CTC GTG ATG ACA CAG ACT CCA YYC TCC
CTA SCT GTG ACA SYT GGA GAG MMG GYT TCT ATS AGC
TGC AAG TCC AGT CAG
3′FAP-VL-B
(SEQ ID NO. 1168)
AGA CTG CCC TGG CTT CTG CWG GWA CCA GGC CAA GTA
GTT CTT TTG ATT ACG ACT ATA TAA AAG GCT CTG ACT
GGA CTT GCA GCT
5′FAP-VL-C
(SEQ ID NO. 1169)
CAG AAG CCA GGG CAG TCT CCT MAA CTG CTG ATT TWC
TGG GCA TCC ACTA GG GAA TCT GGG GTC CCT GAT CGC
TTC TCA GGC AGT GGA
3′FAP-VL-D
(SEQ ID NO. 1170)
ATA TTG CTG ACA GTM ATA AAC TSC CAS GTC CTC AGC
CTS CAC WCT GCT GAT CKT GAG AKT GAA ATC CGT CCC
ARA TCC ACT GCC TGA GAA
3′FAP-VL-E-BsiWI/SpeI
(SEQ ID NO. 1171)
CCA GTA ACT AGT CGT ACG TTT GAT CTC CAC CTT GGT
CCC ACC ACC GAA CGT GAG CGG ATA GCT AAA ATA TTG
CTG ACA GT

[0996] This primer set spans over the whole corresponding VL sequence. Within the set primers are mixed in equal amounts (e.g. 1 μl of each primer (primer stocks 20 to 100 μM) to a 20 μl PCR reaction) and added to a PCR mix consisting of PCR buffer, nucleotides and Taq polymerase. This mix is incubated at 94° C. for 3 minutes, 65° C. for 1 minute, 62° C. for 1 minute, 59° C. for 1 minute, 56° C. for 1 minute, 52° C. for 1 minute, 50° C. for 1 minute and at 72° C. for 10 minutes in a PCR cycler. Subsequently the product is run in an agarose gel electrophoresis and the product of a size from 200 to 400 isolated from the gel according to standard methods.

[0997] The VL PCR product is then used as a template for a standard PCR reaction using primers that incorporate N-terminal and C-terminal suitable cloning restriction sites. The DNA fragment of the correct size (for a VL approximately 330 nucleotides) is isolated by agarose gel electrophoresis according to standard methods. In this way sufficient VL DNA fragment is amplified.

[0998] The final VH1 1-03-based VH PCR product (i.e. the repertoire of human/humanized VH) is then combined with the final Vkll O 11-based VL PCR product (i.e. the repertoire of human/humanized VL) in the phage display vector pComb3H5Bhis to form a library of functional scFvs from which—after display on filamentous phage—anti-FAPalpha binders are selected, screened, identified and confirmed as described in the following:

[0999] 450 ng of the light chain fragments (Sacl-Spel digested) are ligated with 1400 ng of the phagemid pComb3H5Bhis (Sacl-Spel digested; large fragment). The resulting combinatorial antibody library is then transformed into 300 μl of electrocompetent Escherichia coli XL1 Blue cells by electroporation (2.5 kV, 0.2 cm gap cuvette, 25 μFD, 200 Ohm, Biorad gene-pulser) resulting in a library size of more than 10⁷ independent clones. After one hour of phenotype expression, positive transformants are selected for carbenicillin resistance encoded by the pComb3H5BHis vector in 100 ml of liquid super broth (SB)-culture over night. Cells are then harvested by centrifugation and plasmid preparation is carried out using a commercially available plasmid preparation kit (Qiagen).

[1000] 2800 ng of this plasmid-DNA containing the VL-library (Xhol-BstEII digested; large fragment) are ligated with 900 ng of the heavy chain V-fragments (Xhol-BstEII digested) and again transformed into two 300 μl aliquots of electrocompetent E. coli XL1 Blue cells by electroporation (2.5 kV, 0.2 cm gap cuvette, 25 PFD, 200 Ohm) resulting in a total VH-VL scFv (single chain variable fragment) library size of more than 10⁷ independent clones.

[1001] After phenotype expression and slow adaptation to carbenicillin, the E. coli cells containing the antibody library are transferred into SB-carbenicillin (SB with 50 μg/mL carbenicillin) selection medium. The E. coli cells containing the antibody library are then infected with an infectious dose of 10¹² particles of helper phage VCSM13 resulting in the production and secretion of filamentous M13 phage, wherein each phage particle contains single stranded pComb3H5BHis-DNA encoding a scFv-fragment and displays the corresponding scFv-protein as a translational fusion to phage coat protein Ill. This pool of phages displaying the antibody library is used for the selection of antigen binding entities.

[1002] For this purpose the phage library carrying the cloned scFv-repertoire is harvested from the respective culture supernatant by PEG8000/NaCl precipitation and centrifugation. Approximately 10¹¹ to 10¹² scFv phage particles are resuspended in 0.4 ml of PBS/0.1% BSA and incubated with 10⁵ to 10⁷ FAPalpha transfected CHO cells (see example 31.1) for 1 hour on ice under slow agitation. These FAPalpha transfected CHO cells are harvested beforehand by centrifugation, washed in PBS and resuspended in PBS/1% FCS (containing 0.05% Na Azide). scFv phage which do not specifically bind to the FAPalpha transfected CHO cells are eliminated by up to five washing steps with PBS/1% FCS (containing 0.05% Na Azide). After washing, binding entities are eluted from the cells by resuspending the cells in HCl-glycine pH 2.2 (10 min incubation with subsequent vortexing) and after neutralization with 2 M Tris pH 12, the eluate is used for infection of a fresh uninfected E. coli XL1 Blue culture (OD600>0.5). The E. coli culture containing E. coli cells successfully transduced with a phagemid copy, encoding a human/humanized scFv-fragment, are again selected for carbenicillin resistance and subsequently infected with VCMS 13 helper phage to start the second round of antibody display and in vitro selection. Typically a total of 4 to 5 rounds of selections are carried out.

[1003] In order to screen for FAPalpha specific binders plasmid DNA corresponding to 4 and 5 rounds of panning is isolated from E. coli cultures after selection. For the production of soluble scFv-protein, VH-VL-DNA fragments are excised from the plasmids (Xhol-Spel). These fragments are cloned via the same restriction sites into the plasmid pComb3H5BFlag/His differing from the original pComb3H5BHis in that the expression construct (e.g. scFv) includes a Flag-tag (DYKDDDDK) between the scFv and the His6-tag and the additional phage proteins are deleted. After ligation, each pool (different rounds of panning) of plasmid DNA is transformed into 100 μl heat shock competent E. coli TG1 or XLI blue and plated onto carbenicillin LB-agar. Single colonies are picked into 100 μl of LB carb (LB with 50 μg/ml carbenicillin).

[1004] E. coli transformed with pComb3H5BFlag/His containing a VL-and VH-segment produce soluble scFv in sufficient amounts after induction with 1 mM IPTG. Due to a suitable signal sequence, the scFv is exported into the periplasma where it folds into a functional conformation.

[1005] Single E. coli bacterial colonies from the transformation plates are picked for periplasmic small scale preparations and grown in SB-medium (e.g. 10 ml) supplemented with 20 mM MgCl₂ and carbenicillin 50 μg/ml (and re-dissolved in PBS (e.g. 1 ml) after harvesting. A temperature shock is applied by four rounds of freezing at −70° C. and thawing at 37° C. whereby the outer membrane of the bacteria is destroyed and the soluble periplasmic proteins including the scFvs are released into the supernatant. After elimination of intact cells and cell-debris by centrifugation, the supernatant containing the anti-FAPalpha scFvs is collected and used for the identification of FAPalpha specific binders as follows:

[1006] Binding of scFvs to FAPalpha is tested by flow cytometry on FAPalpha transfected CHO cells (see example 31.1); untransfected CHO cells are use as negative control. For flow cytometry 2.5×10⁵ cells are incubated with 50 μl of scFv periplasmic preparation or with 5 μg/ml of purified scFv in 50 μl PBS with 2% FCS. The binding of scFv is detected with an anti-His antibody (Penta-His Antibody, BSA free, Qiagen GmbH, Hilden, FRG) at 2 μg/ml in 50 μl PBS with 2% FCS. As a second step reagent a R-Phycoerythrin-conjugated affinity purified F(ab′)2 fragment, goat anti-mouse IgG (Fc-gamma fragment specific), diluted 1:100 in 50 μl PBS with 2% FCS (Dianova, Hamburg, FRG) is used. The samples are measured on a FACSscan (BD biosciences, Heidelberg, FRG).

[1007] Single clones are then analyzed for favorable properties and amino acid sequence. FAPalpha specific scFvs are converted into recombinant bispecific single chain antibodies by joining them via a Gly₄Ser₁-linker with the CD3 specific scFv I2C (SEQ ID NO. 185) or any other CD3 specific scFv of the invention to result in constructs with the domain arrangement VL_{FAPalpha}—(Gly₄Ser₁)₃—VH_{FAPalpha}—Ser₁Gly₄Ser₁—VH_{CD3}—(Gly₄Ser₁)₃—VL_{CD3} or alternative domain arrangements. For expression in CHO cells the coding sequences of (i) an N-terminal immunoglobulin heavy chain leader comprising a start codon embedded within a Kozak consensus sequence and (ii) a C-terminal Hise-tag followed by a stop codon are both attached in frame to the nucleotide sequence encoding the bispecific single chain antibodies prior to insertion of the resulting DNA-fragment as obtained by gene synthesis into the multiple cloning site of the expression vector pEF-DHFR (Raum et al. Cancer Immunol Immunother 50 (2001) 141-150). Transfection of the generated expression plasmids, protein expression and purification of cross-species specific bispecific antibody constructs are performed as described in Examples 31.3 and 31.4. All other state of the art procedures are carried out according to standard protocols (Sambrook, Molecular Cloning; A Laboratory Manual, 3rd edition, Cold Spring Harbour Laboratory Press, Cold Spring Harbour, New York (2001)).

[1008] Identification of functional bispecific single-chain antibody constructs is carried out by flow cytometric binding analysis of culture supernatant from transfected cells expressing the cross-species specific bispecific antibody constructs. Analysis is performed as described in Example 31.5. Only those constructs showing bispecific binding to human and macaque CD3 as well as to FAPalpha are selected for further use.

[1009] Cytotoxic activity of the generated cross-species specific bispecific single chain antibody constructs against FAPalpha positive target cells elicited by effector cells is analyzed as described in Example 31.6. Only those constructs showing potent recruitment of cytotoxic activity of effector cells against cells positive for FAPalpha are selected for further use.

### 32. Generation and Characterization of Additional FAPalpha and CD3 Cross-Species Specific Bispecific Single Chain Molecules

### 32.1 Generation of FAPalpha and CD3 Cross-Species Specific Bispecific Single Chain Molecules

### Cloning of Cross-Species Specific Binding Molecules

[1010] Bispecific single chain antibody molecules, with a binding specificity cross-species specific for human and non-chimpanzee primate CD3epsilon as well as a binding specificity cross-species specific for human and non-chimpanzee primate FAPalpha, were designed as set out in the following Table 16:

TABLE 16
Formats of anti-CD3 and anti-FAPalpha cross-species
specific bispecific single chain antibody molecules

| SEQ ID (nucl/prot) | Formats of protein constructs (N → C) |
|---|---|
| 1861/1860 | FA19D12HL × I2CHL |
| 1847/1846 | FA20H3HL × I2CHL |
| 1791/1790 | FA22A9HL × I2CHL |
| 1805/1804 | FA22C11HL × I2CHL |
| 1875/1874 | FA19D9HL × I2CHL |
| 1819/1818 | FA22D8HL × I2CHL |
| 1833/1832 | FA22E8HL × I2CHL |

[1011] Generation, expression and purification of these cross-species specific bispecific single chain molecules was performed as described above.

[1012] The flow cytometric binding analysis of the FAPalpha and CD3 cross-species specific bispecific antibodies was performed as described above. The bispecific binding of the single chain molecules listed above, which are cross-species specific for FAPalpha and cross-species specific for human and non-chimpanzee primate CD3 was clearly detectable as shown in FIG. 70. In the FACS analysis all constructs showed binding to CD3 and FAPalpha compared to the negative control. Cross-species specificity of the bispecific antibodies to human and macaque CD3 and FAPalpha antigens was demonstrated.

[1013] Bioactivity of the generated bispecific single chain antibodies was analyzed by chromium 51 (⁵¹Cr) release in vitro cytotoxicity assays as described above. As shown in FIG. 71 all of the generated cross-species specific bispecific single chain antibody constructs demonstrated cytotoxic activity against human FAPalpha positive target cells elicited by stimulated human CD4/CD56 depleted PBMC and macaque FAPalpha positive target cells elicited by the macaque T cell line 4119LnPx.

32.2 Generation and Flow Cytometric Binding Analysis of Cross-Species Specific Single Chain Antibody Fragments (scFv) Binding to FAPalpha

[1014] scFv cross-species specific for FAPalpha were generated as described above and designated as set out in the following Table 17:

TABLE 17
Designation of cross-species specific
single chain antibody fragments

| SEQ ID (nucl/prot) | Designation |
|---|---|
| 1901/1900 | 86C12HL |
| 1887/1886 | 87G9HL |
| 1971/1970 | 86F12HL |
| 1957/1956 | 86F10HL |
| 1985/1984 | 86F2HL |
| 1943/1942 | 86E5HL |
| 1929/1928 | 86D6HL |
| 1915/1914 | 86D2HL |

[1015] The flow cytometric binding analysis of periplasmic preparations containing scFv cross-species specific for FAPalpha using CHO cells transfected with human FAPalpha and CHO cells transfected with macaque FAPalpha was performed as described above. The binding of the scFv listed above, which are cross-species specific for FAPalpha was clearly detectable as shown in FIG. 72. In the FACS analysis all constructs showed binding to FAPalpha compared to the negative control. Cross-species specificity of the scFv antibodies to human and macaque FAPalpha antigens was demonstrated.

[1016] Cloning of cross-species specific binding molecules based on the scFvs and expression and purification of these cross-species specific bispecific single chain molecules is performed as described above. Flow cytometric analysis of cross-species specific bispecific binding and analysis of bioactivity by chromium 51 (⁵¹Cr) release in vitro cytotoxicity assays is performed as described above. Based on demonstrated cross-species specific bispecific binding and recruited cytotoxicity cross-species specific binding molecules are selected for further use.

[1017] Human/humanized equivalents of non-human scFvs cross-species specific for FAPalpha contained in the selected cross-species specific bispecific single chain molecules are generated as described herein. Cloning of cross-species specific binding molecules based on these human/humanized scFvs and expression and purification of these cross-species specific bispecific single chain molecules is performed as described above. Flow cytometric analysis of cross-species specific bispecific binding and analysis of bioactivity by chromium 51 (⁵¹Cr) release in vitro cytotoxicity assays is performed as described above. Based on demonstrated cross-species specific bispecific binding and recruited cytotoxicity cross-species specific binding molecules are selected for further use.

### 33. Generation and Characterization of IGF-1R and CD3 Cross-Species Specific Bispecific Single Chain Molecules

### 33.1 Generation of CHO Cells Expressing Human IGF-1R

[1018] The coding sequence of human IGF-1R as published in GenBank (Accession number NM_000875) was obtained by gene synthesis according to standard protocols. The gene synthesis fragment was designed as to contain first a Kozak site for eukaryotic expression of the construct followed by the coding sequence of the human IGF-1R protein and a stop codon (the cDNA and amino acid sequence of the construct is listed under SEQ ID Nos 2011 and 2012). The gene synthesis fragment was also designed as to introduce restriction sites at the beginning and at the end of the fragment. The introduced restriction sites, EcoRI at the 5′ end and SaII at the 3′ end, were utilized in the following cloning procedures. Undesirable internal restriction sites were removed by silent mutation of the coding sequence in the gene synthesis fragment. The gene synthesis fragment was cloned via EcoRI and SaII into a plasmid designated pEF-DHFR (pEF-DHFR is described in Raum et al. Cancer Immunol Immunother 50 (2001) 141-150) following standard protocols. The aforementioned procedures were carried out according to standard protocols (Sambrook, Molecular Cloning; A Laboratory Manual, 3rd edition, Cold Spring Harbour Laboratory Press, Cold Spring Harbour, New York (2001)). A clone with sequence-verified nucleotide sequence was transfected into DHFR deficient CHO cells for eukaryotic expression of the construct. Eukaryotic protein expression in DHFR deficient CHO cells was performed as described by Kaufmann R. J. (1990) Methods Enzymol. 185, 537-566. Gene amplification of the construct was induced by increasing concentrations of methotrexate (MTX) to a final concentration of up to 20 nM MTX.

### 33.2 Generation of CHO Cells Expressing Macaque IGF-1R

[1019] The coding sequence of macaque IGF-1R as published in GenBank (Accession number XM_001100407) was obtained by gene synthesis according to standard protocols. The gene synthesis fragment was designed as to contain first a Kozak site for eukaryotic expression of the construct followed by the coding sequence of the macaque IGF-1R protein and a stop codon (the cDNA and amino acid sequence of the construct is listed under SEQ ID Nos 2013 and 2014). The gene synthesis fragment was also designed as to introduce restriction sites at the beginning and at the end of the fragment. The introduced restriction sites, EcoRI at the 5′ end and SaII at the 3′ end, were utilized in the following cloning procedures. Undesirable internal restriction sites were removed by silent mutation of the coding sequence in the gene synthesis fragment. The gene synthesis fragment was cloned via EcoRI and SaII into a plasmid designated pEF-DHFR (pEF-DHFR was described in Raum et al. Cancer Immunol Immunother 50 (2001) 141-150) following standard protocols. The aforementioned procedures were carried out according to standard protocols (Sambrook, Molecular Cloning; A Laboratory Manual, 3rd edition, Cold Spring Harbour Laboratory Press, Cold Spring Harbour, New York (2001)). A clone with sequence-verified nucleotide sequence was transfected into DHFR deficient CHO cells for eukaryotic expression of the construct. Eukaryotic protein expression in DHFR deficient CHO cells was performed as described by Kaufmann R. J. (1990) Methods Enzymol. 185, 537-566. Gene amplification of the construct was induced by increasing concentrations of methotrexate (MTX) to a final concentration of up to 20 nM MTX.

### 33.3 Generation of IGF-1R and CD3 Cross-Species Specific Bispecific Single Chain Molecules

### Cloning of Cross-Species Specific Binding Molecules

[1020] Generally, bispecific single chain antibody molecules, each comprising a domain with a binding specificity cross-species specific for human and non-chimpanzee primate CD3epsilon as well as a domain with a binding specificity cross-species specific for human and non-chimpanzee primate IGF-1R, were designed as set out in the following Table 18:

TABLE 18
Formats of anti-CD3 and anti-IGF-1R cross-species
specific bispecific single chain antibody molecules

| SEQ ID (nucl/prot) | Formats of protein constructs (N → C) |
|---|---|
| 2028/2027 | IGF1R2HL × I2CHL |
| 2042/2041 | IGF1R7HL × I2CHL |
| 2056/2055 | IGF1R9HL × I2CHL |
| 2070/2069 | IGF1R10HL × I2CHL |
| 2084/2083 | IGF1R11HL × I2CHL |
| 2098/2097 | IGF1R12HL × I2CHL |
| 2112/2111 | IGF1R13HL × I2CHL |
| 2126/2125 | IGF1R15HL × I2CHL |
| 2140/2139 | IGF1R16HL × I2CHL |
| 2154/2153 | IGF1R17HL × I2CHL |
| 2168/2167 | IGF1R19HL × I2CHL |
| 2182/2181 | IGF1R20HL × I2CHL |
| 2196/2195 | IGF1R21HL × I2CHL |
| 2210/2209 | IGF1R23HL × I2CHL |
| 2224/2223 | IGF1R24HL × I2CHL |

[1021] Generation, expression and purification of these cross-species specific bispecific single chain molecules was performed as described above.

[1022] The flow cytometric binding analysis of the IGF-1R and CD3 cross-species specific bispecific antibodies was performed as described above. The bispecific binding of the single chain molecules listed above, which are cross-species specific for IGF-1R and cross-species specific for human and non-chimpanzee primate CD3 was clearly detectable as shown in FIG. 73. In the FACS analysis all constructs showed binding to CD3 and IGF-1R compared to the negative control. Cross-species specificity of the bispecific antibodies to human and macaque CD3 and IGF-1R antigens was demonstrated.

[1023] Bioactivity of the generated bispecific single chain antibodies was analyzed by chromium 51 (⁵¹Cr) release in vitro cytotoxicity assays as described above. All the cross-species specific bispecific single chain antibody constructs shown in FIG. 74 demonstrated cytotoxic activity against human IGF-1R positive target cells elicited by stimulated human CD4/CD56 depleted PBMC and macaque IGF-1R positive target cells elicited by the macaque T cell line 4119LnPx.

[1024] Human/humanized equivalents of non-human scFvs cross-species specific for IGF-1R contained in the cross-species specific bispecific single chain molecules are generated as described herein. Cloning of cross-species specific binding molecules based on these human/humanized scFvs and expression and purification of these cross-species specific bispecific single chain molecules is performed as described above. Flow cytometric analysis of cross-species specific bispecific binding and analysis of bioactivity by chromium 51 (⁵¹Cr) release in vitro cytotoxicity assays is performed as described above. Based on demonstrated cross-species specific bispecific binding and recruited cytotoxicity cross-species specific binding molecules are selected for further use.

Lengthy table referenced here
US20260116972A1-20260430-T00001
Please refer to the end of the specification for access instructions.

LENGTHY TABLES
The patent application contains a lengthy table section. A copy of the table is available in electronic form from the USPTO web site (https://seqdata.uspto.gov/docdetail?docId=US20260116972A1). An electronic copy of the table will also be available from the USPTO upon request and payment of the fee set forth in 37 CFR 1.19(b)(3).

The application's sequence listing, which the Patent Office published only in electronic form, follows.

SEQUENCE LISTING (2235 sequences)

SEQ ID NO: 1 - protein, 105 aa, Homo sapiens
QDGNEEMGGITQTPYKVSISGTTVILTCPQYPGSEILWQHNDKNIGGDEDDKNIGSDEDHLSLKEFSELEQSGYYVCYPRGSKPEDANFYLYLRARVCENCMEMD

SEQ ID NO: 2 - protein, 27 aa, Homo sapiens
QDGNEEMGGITQTPYKVSISGTTVILT

SEQ ID NO: 3 - protein, 96 aa, Callithrix jacchus
QDGNEEMGDTTQNPYKVSISGTTVTLTCPRYDGHEIKWLVNSQNKEGHEDHLLLEDFSEMEQSGYYACLSKETPAEEASHYLYLKARVCENCVEVD

SEQ ID NO: 4 - protein, 27 aa, Callithrix jacchus
QDGNEEMGDTTQNPYKVSISGTTVTLT

SEQ ID NO: 5 - protein, 96 aa, Saguinus oedipus; identical to SEQ ID NO: 3

SEQ ID NO: 6 - protein, 27 aa, Saguinus oedipus
QDGNEEMGDTTQNPYKVSISGTTVTLT

SEQ ID NO: 7 - protein, 96 aa, Saimiri sciureus
QDGNEEIGDTTQNPYKVSISGTTVTLTCPRYDGQEIKWLVNDQNKEGHEDHLLLEDFSEMEQSGYYACLSKETPTEEASHYLYLKARVCENCVEVD

SEQ ID NO: 8 - protein, 27 aa, Saimiri sciureus
QDGNEEIGDTTQNPYKVSISGTTVTLT

SEQ ID NO: 9 - protein, 14 aa, synthetic construct
  REGION 1..14: note = CDR-L1 of F6A
GSSTGAVTSGYYPN

SEQ ID NO: 10 - protein, 7 aa, synthetic construct
  REGION 1..7: note = CDR-L2 of F6A
GTKFLAP

SEQ ID NO: 11 - protein, 9 aa, synthetic construct
  REGION 1..9: note = CDR-L3 of F6A
ALWYSNRWV

SEQ ID NO: 12 - protein, 5 aa, synthetic construct
  REGION 1..5: note = CDR-H1 of F6A
IYAMN

SEQ ID NO: 13 - protein, 19 aa, synthetic construct
  REGION 1..19: note = CDR-H2 of F6A
RIRSKYNNYATYYADSVKS

SEQ ID NO: 14 - protein, 14 aa, synthetic construct
  REGION 1..14: note = CDR-H3 of F6A
HGNFGNSYVSFFAY

SEQ ID NO: 15 - protein, 125 aa, synthetic construct
  REGION 1..125: note = VH of F6A
EVQLVESGGGLVQPGGSLKLSCAASGFTFNIYAMNWVRQAPGKGLEWVARIRSKYNNYATYYADSVKSRFTISRDDSKNTAYLQMNNLKTEDTAVYYCVRHGNFGNSYVSFFAYWGQGTLVTVSS

SEQ ID NO: 16 - DNA, 375 bp, synthetic construct
  misc_feature 1..375: note = VH of F6A
  source 1..375: mol_type = other DNA
gaggtgcagctggtcgagtctggaggaggattggtgcagcctggagggtcattgaaactctcatgtgcagcctctggattcaccttcaatatctacgccatgaactgggtccgccaggctccaggaaagggtttggaatgggttgctcgcataagaagtaaatataataattatgcaacatattatgccgattcagtgaaaagcaggttcaccatctccagagatgattcaaaaaacactgcctatctacaaatgaacaacttgaaaactgaggacactgccgtgtactactgtgtgagacatgggaacttcggtaatagctacgtatccttcttcgcttactggggccaagggactctggtcaccgtctcctca

SEQ ID NO: 17 - protein, 109 aa, synthetic construct
  REGION 1..109: note = VL of F6A
QTVVTQEPSLTVSPGGTVTLTCGSSTGAVTSGYYPNWVQQKPGQAPRGLIGGTKFLAPGTPARFSGSLLGGKAALTLSGVQPEDEAEYYCALWYSNRWVFGGGTKLTVL

SEQ ID NO: 18 - DNA, 327 bp, synthetic construct
  misc_feature 1..327: note = VL of F6A
  source 1..327: mol_type = other DNA
cagactgttgtgactcaggaaccttcactcaccgtatcacctggtggaacagtcacactcacttgtggctcctcgactggggctgttacatctggctactacccaaactgggtccaacaaaaaccaggtcaggcaccccgtggtctaataggtgggactaagttcctcgcccccggtactcctgccagattctcaggctccctgcttggaggcaaggctgccctcaccctctcaggggtacagccagaggatgaggcagaatattactgtgctctatggtacagcaaccgctgggtgttcggtggaggaaccaaactgactgtccta

SEQ ID NO: 19 - protein, 125 aa, synthetic construct
  REGION 1..125: note = VH-P of F6A
EVQLLESGGGLVQPGGSLKLSCAASGFTFNIYAMNWVRQAPGKGLEWVARIRSKYNNYATYYADSVKSRFTISRDDSKNTAYLQMNNLKTEDTAVYYCVRHGNFGNSYVSFFAYWGQGTLVTVSS

SEQ ID NO: 20 - DNA, 375 bp, synthetic construct
  misc_feature 1..375: note = VH-P of F6A
  source 1..375: mol_type = other DNA
gaggtgcagctgctcgagtctggaggaggattggtgcagcctggagggtcattgaaactctcatgtgcagcctctggattcaccttcaatatctacgccatgaactgggtccgccaggctccaggaaagggtttggaatgggttgctcgcataagaagtaaatataataattatgcaacatattatgccgattcagtgaaaagcaggttcaccatctccagagatgattcaaaaaacactgcctatctacaaatgaacaacttgaaaactgaggacactgccgtgtactactgtgtgagacatgggaacttcggtaatagctacgtatccttcttcgcttactggggccaagggactctggtcaccgtctcctca

SEQ ID NO: 21 - protein, 109 aa, synthetic construct
  REGION 1..109: note = VL-P of F6A
ELVVTQEPSLTVSPGGTVTLTCGSSTGAVTSGYYPNWVQQKPGQAPRGLIGGTKFLAPGTPARFSGSLLGGKAALTLSGVQPEDEAEYYCALWYSNRWVFGGGTKLTVL

SEQ ID NO: 22 - DNA, 327 bp, synthetic construct
  misc_feature 1..327: note = VL-P of F6A
  source 1..327: mol_type = other DNA
gagctcgttgtgactcaggaaccttcactcaccgtatcacctggtggaacagtcacactcacttgtggctcctcgactggggctgttacatctggctactacccaaactgggtccaacaaaaaccaggtcaggcaccccgtggtctaataggtgggactaagttcctcgcccccggtactcctgccagattctcaggctccctgcttggaggcaaggctgccctcaccctctcaggggtacagccagaggatgaggcagaatattactgtgctctatggtacagcaaccgctgggtgttcggtggaggaaccaaactgactgtccta

SEQ ID NO: 23 - protein, 249 aa, synthetic construct
  REGION 1..249: note = VH-VL of F6A
EVQLVESGGGLVQPGGSLKLSCAASGFTFNIYAMNWVRQAPGKGLEWVARIRSKYNNYATYYADSVKSRFTISRDDSKNTAYLQMNNLKTEDTAVYYCVRHGNFGNSYVSFFAYWGQGTLVTVSSGGGGSGGGGSGGGGSQTVVTQEPSLTVSPGGTVTLTCGSSTGAVTSGYYPNWVQQKPGQAPRGLIGGTKFLAPGTPARFSGSLLGGKAALTLSGVQPEDEAEYYCALWYSNRWVFGGGTKLTVL

SEQ ID NO: 24 - DNA, 747 bp, synthetic construct
  misc_feature 1..747: note = VH-VL of F6A
  source 1..747: mol_type = other DNA
gaggtgcagctggtcgagtctggaggaggattggtgcagcctggagggtcattgaaactctcatgtgcagcctctggattcaccttcaatatctacgccatgaactgggtccgccaggctccaggaaagggtttggaatgggttgctcgcataagaagtaaatataataattatgcaacatattatgccgattcagtgaaaagcaggttcaccatctccagagatgattcaaaaaacactgcctatctacaaatgaacaacttgaaaactgaggacactgccgtgtactactgtgtgagacatgggaacttcggtaatagctacgtatccttcttcgcttactggggccaagggactctggtcaccgtctcctcaggtggtggtggttctggcggcggcggctccggtggtggtggttctcagactgttgtgactcaggaaccttcactcaccgtatcacctggtggaacagtcacactcacttgtggctcctcgactggggctgttacatctggctactacccaaactgggtccaacaaaaaccaggtcaggcaccccgtggtctaataggtgggactaagttcctcgcccccggtactcctgccagattctcaggctccctgcttggaggcaaggctgccctcaccctctcaggggtacagccagaggatgaggcagaatattactgtgctctatggtacagcaaccgctgggtgttcggtggaggaaccaaactgactgtccta

SEQ ID NO: 25 - protein, 249 aa, synthetic construct
  REGION 1..249: note = VH-VL-P of F6A
EVQLLESGGGLVQPGGSLKLSCAASGFTFNIYAMNWVRQAPGKGLEWVARIRSKYNNYATYYADSVKSRFTISRDDSKNTAYLQMNNLKTEDTAVYYCVRHGNFGNSYVSFFAYWGQGTLVTVSSGGGGSGGGGSGGGGSELVVTQEPSLTVSPGGTVTLTCGSSTGAVTSGYYPNWVQQKPGQAPRGLIGGTKFLAPGTPARFSGSLLGGKAALTLSGVQPEDEAEYYCALWYSNRWVFGGGTKLTVL

SEQ ID NO: 26 - DNA, 747 bp, synthetic construct
  misc_feature 1..747: note = VH-VL-P of F6A
  source 1..747: mol_type = other DNA
gaggtgcagctgctcgagtctggaggaggattggtgcagcctggagggtcattgaaactctcatgtgcagcctctggattcaccttcaatatctacgccatgaactgggtccgccaggctccaggaaagggtttggaatgggttgctcgcataagaagtaaatataataattatgcaacatattatgccgattcagtgaaaagcaggttcaccatctccagagatgattcaaaaaacactgcctatctacaaatgaacaacttgaaaactgaggacactgccgtgtactactgtgtgagacatgggaacttcggtaatagctacgtatccttcttcgcttactggggccaagggactctggtcaccgtctcctcaggtggtggtggttctggcggcggcggctccggtggtggtggttctgagctcgttgtgactcaggaaccttcactcaccgtatcacctggtggaacagtcacactcacttgtggctcctcgactggggctgttacatctggctactacccaaactgggtccaacaaaaaccaggtcaggcaccccgtggtctaataggtgggactaagttcctcgcccccggtactcctgccagattctcaggctccctgcttggaggcaaggctgccctcaccctctcaggggtacagccagaggatgaggcagaatattactgtgctctatggtacagcaaccgctgggtgttcggtggaggaaccaaactgactgtccta

SEQ ID NO: 27 - protein, 14 aa, synthetic construct
  REGION 1..14: note = CDR-L1 of H2C
GSSTGAVTSGYYPN

SEQ ID NO: 28 - protein, 7 aa, synthetic construct
  REGION 1..7: note = CDR-L2 of H2C
GTKFLAP

SEQ ID NO: 29 - protein, 9 aa, synthetic construct
  REGION 1..9: note = CDR-L3 of H2C
ALWYSNRWV

SEQ ID NO: 30 - protein, 5 aa, synthetic construct
  REGION 1..5: note = CDR-H1 of H2C
KYAMN

SEQ ID NO: 31 - protein, 19 aa, synthetic construct
  REGION 1..19: note = CDR-H2 of H2C
RIRSKYNNYATYYADSVKD

SEQ ID NO: 32 - protein, 14 aa, synthetic construct
  REGION 1..14: note = CDR-H3 of H2C
HGNFGNSYISYWAY

SEQ ID NO: 33 - protein, 125 aa, synthetic construct
  REGION 1..125: note = VH of H2C
EVQLVESGGGLVQPGGSLKLSCAASGFTFNKYAMNWVRQAPGKGLEWVARIRSKYNNYATYYADSVKDRFTISRDDSKNTAYLQMNNLKTEDTAVYYCVRHGNFGNSYISYWAYWGQGTLVTVSS

SEQ ID NO: 34 - DNA, 375 bp, synthetic construct
  misc_feature 1..375: note = VH of H2C
  source 1..375: mol_type = other DNA
gaggtgcagctggtcgagtctggaggaggattggtgcagcctggagggtcattgaaactctcatgtgcagcctctggattcaccttcaataagtacgccatgaactgggtccgccaggctccaggaaagggtttggaatgggttgctcgcataagaagtaaatataataattatgcaacatattatgccgattcagtgaaagacaggttcaccatctccagagatgattcaaaaaacactgcctatctacaaatgaacaacttgaaaactgaggacactgccgtgtactactgtgtgagacatgggaacttcggtaatagctacatatcctactgggcttactggggccaagggactctggtcaccgtctcctca

SEQ ID NO: 35 - protein, 109 aa, synthetic construct; identical to SEQ ID NO: 17
  REGION 1..109: note = VL of H2C

SEQ ID NO: 36 - DNA, 327 bp, synthetic construct; identical to SEQ ID NO: 18
  misc_feature 1..327: note = VL of H2C
  source 1..327: mol_type = other DNA

SEQ ID NO: 37 - protein, 125 aa, synthetic construct
  REGION 1..125: note = VH-P of H2C
EVQLLESGGGLVQPGGSLKLSCAASGFTFNKYAMNWVRQAPGKGLEWVARIRSKYNNYATYYADSVKDRFTISRDDSKNTAYLQMNNLKTEDTAVYYCVRHGNFGNSYISYWAYWGQGTLVTVSS

SEQ ID NO: 38 - DNA, 375 bp, synthetic construct
  misc_feature 1..375: note = VH-P of H2C
  source 1..375: mol_type = other DNA
gaggtgcagctgctcgagtctggaggaggattggtgcagcctggagggtcattgaaactctcatgtgcagcctctggattcaccttcaataagtacgccatgaactgggtccgccaggctccaggaaagggtttggaatgggttgctcgcataagaagtaaatataataattatgcaacatattatgccgattcagtgaaagacaggttcaccatctccagagatgattcaaaaaacactgcctatctacaaatgaacaacttgaaaactgaggacactgccgtgtactactgtgtgagacatgggaacttcggtaatagctacatatcctactgggcttactggggccaagggactctggtcaccgtctcctca

SEQ ID NO: 39 - protein, 109 aa, synthetic construct; identical to SEQ ID NO: 21
  REGION 1..109: note = VL-P of H2C

SEQ ID NO: 40 - DNA, 327 bp, synthetic construct; identical to SEQ ID NO: 22
  misc_feature 1..327: note = VL-P of H2C
  source 1..327: mol_type = other DNA

SEQ ID NO: 41 - protein, 249 aa, synthetic construct
  REGION 1..249: note = VH-VL of H2C
EVQLVESGGGLVQPGGSLKLSCAASGFTFNKYAMNWVRQAPGKGLEWVARIRSKYNNYATYYADSVKDRFTISRDDSKNTAYLQMNNLKTEDTAVYYCVRHGNFGNSYISYWAYWGQGTLVTVSSGGGGSGGGGSGGGGSQTVVTQEPSLTVSPGGTVTLTCGSSTGAVTSGYYPNWVQQKPGQAPRGLIGGTKFLAPGTPARFSGSLLGGKAALTLSGVQPEDEAEYYCALWYSNRWVFGGGTKLTVL

SEQ ID NO: 42 - DNA, 747 bp, synthetic construct
  misc_feature 1..747: note = VH-VL of H2C
  source 1..747: mol_type = other DNA
gaggtgcagctggtcgagtctggaggaggattggtgcagcctggagggtcattgaaactctcatgtgcagcctctggattcaccttcaataagtacgccatgaactgggtccgccaggctccaggaaagggtttggaatgggttgctcgcataagaagtaaatataataattatgcaacatattatgccgattcagtgaaagacaggttcaccatctccagagatgattcaaaaaacactgcctatctacaaatgaacaacttgaaaactgaggacactgccgtgtactactgtgtgagacatgggaacttcggtaatagctacatatcctactgggcttactggggccaagggactctggtcaccgtctcctcaggtggtggtggttctggcggcggcggctccggtggtggtggttctcagactgttgtgactcaggaaccttcactcaccgtatcacctggtggaacagtcacactcacttgtggctcctcgactggggctgttacatctggctactacccaaactgggtccaacaaaaaccaggtcaggcaccccgtggtctaataggtgggactaagttcctcgcccccggtactcctgccagattctcaggctccctgcttggaggcaaggctgccctcaccctctcaggggtacagccagaggatgaggcagaatattactgtgctctatggtacagcaaccgctgggtgttcggtggaggaaccaaactgactgtccta

SEQ ID NO: 43 - protein, 249 aa, synthetic construct
  REGION 1..249: note = VH-VL-P of H2C
EVQLLESGGGLVQPGGSLKLSCAASGFTFNKYAMNWVRQAPGKGLEWVARIRSKYNNYATYYADSVKDRFTISRDDSKNTAYLQMNNLKTEDTAVYYCVRHGNFGNSYISYWAYWGQGTLVTVSSGGGGSGGGGSGGGGSELVVTQEPSLTVSPGGTVTLTCGSSTGAVTSGYYPNWVQQKPGQAPRGLIGGTKFLAPGTPARFSGSLLGGKAALTLSGVQPEDEAEYYCALWYSNRWVFGGGTKLTVL

SEQ ID NO: 44 - DNA, 747 bp, synthetic construct
  misc_feature 1..747: note = VH-VL-P of H2C
  source 1..747: mol_type = other DNA
gaggtgcagctgctcgagtctggaggaggattggtgcagcctggagggtcattgaaactctcatgtgcagcctctggattcaccttcaataagtacgccatgaactgggtccgccaggctccaggaaagggtttggaatgggttgctcgcataagaagtaaatataataattatgcaacatattatgccgattcagtgaaagacaggttcaccatctccagagatgattcaaaaaacactgcctatctacaaatgaacaacttgaaaactgaggacactgccgtgtactactgtgtgagacatgggaacttcggtaatagctacatatcctactgggcttactggggccaagggactctggtcaccgtctcctcaggtggtggtggttctggcggcggcggctccggtggtggtggttctgagctcgttgtgactcaggaaccttcactcaccgtatcacctggtggaacagtcacactcacttgtggctcctcgactggggctgttacatctggctactacccaaactgggtccaacaaaaaccaggtcaggcaccccgtggtctaataggtgggactaagttcctcgcccccggtactcctgccagattctcaggctccctgcttggaggcaaggctgccctcaccctctcaggggtacagccagaggatgaggcagaatattactgtgctctatggtacagcaaccgctgggtgttcggtggaggaaccaaactgactgtccta

SEQ ID NO: 45 - protein, 14 aa, synthetic construct
  REGION 1..14: note = CDR-L1 of H1E
GSSTGAVTSGYYPN

SEQ ID NO: 46 - protein, 7 aa, synthetic construct
  REGION 1..7: note = CDR-L2 of H1E
GTKFLAP

SEQ ID NO: 47 - protein, 9 aa, synthetic construct
  REGION 1..9: note = CDR-L3 of H1E
ALWYSNRWV

SEQ ID NO: 48 - protein, 5 aa, synthetic construct
  REGION 1..5: note = CDR-H1 of H1E
SYAMN

SEQ ID NO: 49 - protein, 19 aa, synthetic construct
  REGION 1..19: note = CDR-H2 of H1E
RIRSKYNNYATYYADSVKG

SEQ ID NO: 50 - protein, 14 aa, synthetic construct
  REGION 1..14: note = CDR-H3 of H1E
HGNFGNSYLSFWAY

SEQ ID NO: 51 - protein, 125 aa, synthetic construct
  REGION 1..125: note = VH of H1E
EVQLVESGGGLEQPGGSLKLSCAASGFTFNSYAMNWVRQAPGKGLEWVARIRSKYNNYATYYADSVKGRFTISRDDSKNTAYLQMNNLKTEDTAVYYCVRHGNFGNSYLSFWAYWGQGTLVTVSS

SEQ ID NO: 52 - DNA, 374 bp, synthetic construct
  misc_feature 1..374: note = VH of H1E
  source 1..374: mol_type = other DNA
gaggtgcagctggtcgagtctggaggaggattggagcagcctggagggtcattgaaactctcatgtgcagcctctggattcaccttcaattcgtacgccatgaactgggtccgccaggctccaggaaagggtttggaatgggttgctcgcataagaagtaaatataataattatgcaacatattatgccgattcagtgaaagggaggttcaccatctccagagatgattcaaaaaacactgcctatctacaaatgaacaacttgaaaactgaggacactgccgtgtactactgtgtgagacatgggaacttcggtaatagctacctatccttctgggcttactggggccaagggactctggtcaccgtctcctc

SEQ ID NO: 53 - protein, 109 aa, synthetic construct; identical to SEQ ID NO: 17
  REGION 1..109: note = VL of H1E

SEQ ID NO: 54 - DNA, 327 bp, synthetic construct; identical to SEQ ID NO: 18
  misc_feature 1..327: note = VL of H1E
  source 1..327: mol_type = other DNA

SEQ ID NO: 55 - protein, 125 aa, synthetic construct
  REGION 1..125: note = VH-P of H1E
EVQLLESGGGLEQPGGSLKLSCAASGFTFNSYAMNWVRQAPGKGLEWVARIRSKYNNYATYYADSVKGRFTISRDDSKNTAYLQMNNLKTEDTAVYYCVRHGNFGNSYLSFWAYWGQGTLVTVSS

SEQ ID NO: 56 - DNA, 375 bp, synthetic construct
  misc_feature 1..375: note = VH-P of H1E
  source 1..375: mol_type = other DNA
gaggtgcagctgctcgagtctggaggaggattggagcagcctggagggtcattgaaactctcatgtgcagcctctggattcaccttcaattcgtacgccatgaactgggtccgccaggctccaggaaagggtttggaatgggttgctcgcataagaagtaaatataataattatgcaacatattatgccgattcagtgaaagggaggttcaccatctccagagatgattcaaaaaacactgcctatctacaaatgaacaacttgaaaactgaggacactgccgtgtactactgtgtgagacatgggaacttcggtaatagctacctatccttctgggcttactggggccaagggactctggtcaccgtctcctca

SEQ ID NO: 57 - protein, 109 aa, synthetic construct; identical to SEQ ID NO: 21
  REGION 1..109: note = VL-P of H1E

SEQ ID NO: 58 - DNA, 327 bp, synthetic construct; identical to SEQ ID NO: 22
  misc_feature 1..327: note = VL-P of H1E
  source 1..327: mol_type = other DNA

SEQ ID NO: 59 - protein, 249 aa, synthetic construct
  REGION 1..249: note = VH-VL of H1E
EVQLVESGGGLEQPGGSLKLSCAASGFTFNSYAMNWVRQAPGKGLEWVARIRSKYNNYATYYADSVKGRFTISRDDSKNTAYLQMNNLKTEDTAVYYCVRHGNFGNSYLSFWAYWGQGTLVTVSSGGGGSGGGGSGGGGSQTVVTQEPSLTVSPGGTVTLTCGSSTGAVTSGYYPNWVQQKPGQAPRGLIGGTKFLAPGTPARFSGSLLGGKAALTLSGVQPEDEAEYYCALWYSNRWVFGGGTKLTVL

SEQ ID NO: 60 - DNA, 747 bp, synthetic construct
  misc_feature 1..747: note = VH-VL of H1E
  source 1..747: mol_type = other DNA
gaggtgcagctggtcgagtctggaggaggattggagcagcctggagggtcattgaaactctcatgtgcagcctctggattcaccttcaattcgtacgccatgaactgggtccgccaggctccaggaaagggtttggaatgggttgctcgcataagaagtaaatataataattatgcaacatattatgccgattcagtgaaagggaggttcaccatctccagagatgattcaaaaaacactgcctatctacaaatgaacaacttgaaaactgaggacactgccgtgtactactgtgtgagacatgggaacttcggtaatagctacctatccttctgggcttactggggccaagggactctggtcaccgtctcctcaggtggtggtggttctggcggcggcggctccggtggtggtggttctcagactgttgtgactcaggaaccttcactcaccgtatcacctggtggaacagtcacactcacttgtggctcctcgactggggctgttacatctggctactacccaaactgggtccaacaaaaaccaggtcaggcaccccgtggtctaataggtgggactaagttcctcgcccccggtactcctgccagattctcaggctccctgcttggaggcaaggctgccctcaccctctcaggggtacagccagaggatgaggcagaatattactgtgctctatggtacagcaaccgctgggtgttcggtggaggaaccaaactgactgtccta

SEQ ID NO: 61 - protein, 249 aa, synthetic construct
  REGION 1..249: note = VH-VL-P of H1E
EVQLLESGGGLEQPGGSLKLSCAASGFTFNSYAMNWVRQAPGKGLEWVARIRSKYNNYATYYADSVKGRFTISRDDSKNTAYLQMNNLKTEDTAVYYCVRHGNFGNSYLSFWAYWGQGTLVTVSSGGGGSGGGGSGGGGSELVVTQEPSLTVSPGGTVTLTCGSSTGAVTSGYYPNWVQQKPGQAPRGLIGGTKFLAPGTPARFSGSLLGGKAALTLSGVQPEDEAEYYCALWYSNRWVFGGGTKLTVL

SEQ ID NO: 62 - DNA, 747 bp, synthetic construct
  misc_feature 1..747: note = VH-VL-P of H1E
  source 1..747: mol_type = other DNA
gaggtgcagctgctcgagtctggaggaggattggagcagcctggagggtcattgaaactctcatgtgcagcctctggattcaccttcaattcgtacgccatgaactgggtccgccaggctccaggaaagggtttggaatgggttgctcgcataagaagtaaatataataattatgcaacatattatgccgattcagtgaaagggaggttcaccatctccagagatgattcaaaaaacactgcctatctacaaatgaacaacttgaaaactgaggacactgccgtgtactactgtgtgagacatgggaacttcggtaatagctacctatccttctgggcttactggggccaagggactctggtcaccgtctcctcaggtggtggtggttctggcggcggcggctccggtggtggtggttctgagctcgttgtgactcaggaaccttcactcaccgtatcacctggtggaacagtcacactcacttgtggctcctcgactggggctgttacatctggctactacccaaactgggtccaacaaaaaccaggtcaggcaccccgtggtctaataggtgggactaagttcctcgcccccggtactcctgccagattctcaggctccctgcttggaggcaaggctgccctcaccctctcaggggtacagccagaggatgaggcagaatattactgtgctctatggtacagcaaccgctgggtgttcggtggaggaaccaaactgactgtccta

SEQ ID NO: 63 - protein, 14 aa, synthetic construct
  REGION 1..14: note = CDR-L1 of G4H
GSSTGAVTSGYYPN

SEQ ID NO: 64 - protein, 7 aa, synthetic construct
  REGION 1..7: note = CDR-L2 of G4H
GTKFLAP

SEQ ID NO: 65 - protein, 9 aa, synthetic construct
  REGION 1..9: note = CDR-L3 of G4H
ALWYSNRWV

SEQ ID NO: 66 - protein, 5 aa, synthetic construct
  REGION 1..5: note = CDR-H1 of G4H
RYAMN

SEQ ID NO: 67 - protein, 19 aa, synthetic construct
  REGION 1..19: note = CDR-H2 of G4H
RIRSKYNNYATYYADSVKG

SEQ ID NO: 68 - protein, 14 aa, synthetic construct
  REGION 1..14: note = CDR-H3 of G4H
HGNFGNSYLSYFAY

SEQ ID NO: 69 - protein, 125 aa, synthetic construct
  REGION 1..125: note = VH of G4H
EVQLVESGGGLVQPGGSLKLSCAASGFTFNRYAMNWVRQAPGKGLEWVARIRSKYNNYATYYADSVKGRFTISRDDSKNTAYLQMNNLKTEDTAVYYCVRHGNFGNSYLSYFAYWGQGTLVTVSS

SEQ ID NO: 70 - DNA, 375 bp, synthetic construct
  misc_feature 1..375: note = VH of G4H
  source 1..375: mol_type = other DNA
gaggtgcagctggtcgagtctggaggaggattggtgcagcctggagggtcattgaaactctcatgtgcagcctctggattcaccttcaatcgctacgccatgaactgggtccgccaggctccaggaaagggtttggaatgggttgctcgcataagaagtaaatataataattatgcaacatattatgccgattcagtgaaagggaggttcaccatctccagagatgattcaaaaaacactgcctatctacaaatgaacaacttgaaaactgaggacactgccgtgtactactgtgtgagacatgggaacttcggtaatagctacttatcctacttcgcttactggggccaagggactctggtcaccgtctcctca

SEQ ID NO: 71 - protein, 109 aa, synthetic construct; identical to SEQ ID NO: 17
  REGION 1..109: note = VL of G4H

SEQ ID NO: 72 - DNA, 327 bp, synthetic construct; identical to SEQ ID NO: 18
  misc_feature 1..327: note = VL of G4H
  source 1..327: mol_type = other DNA

SEQ ID NO: 73 - protein, 125 aa, synthetic construct
  REGION 1..125: note = VH-P of G4H
EVQLLESGGGLVQPGGSLKLSCAASGFTFNRYAMNWVRQAPGKGLEWVARIRSKYNNYATYYADSVKGRFTISRDDSKNTAYLQMNNLKTEDTAVYYCVRHGNFGNSYLSYFAYWGQGTLVTVSS

SEQ ID NO: 74 - DNA, 375 bp, synthetic construct
  misc_feature 1..375: note = VH-P of G4H
  source 1..375: mol_type = other DNA
gaggtgcagctgctcgagtctggaggaggattggtgcagcctggagggtcattgaaactctcatgtgcagcctctggattcaccttcaatcgctacgccatgaactgggtccgccaggctccaggaaagggtttggaatgggttgctcgcataagaagtaaatataataattatgcaacatattatgccgattcagtgaaagggaggttcaccatctccagagatgattcaaaaaacactgcctatctacaaatgaacaacttgaaaactgaggacactgccgtgtactactgtgtgagacatgggaacttcggtaatagctacttatcctacttcgcttactggggccaagggactctggtcaccgtctcctca

SEQ ID NO: 75 - protein, 109 aa, synthetic construct; identical to SEQ ID NO: 21
  REGION 1..109: note = VL-P of G4H

SEQ ID NO: 76 - DNA, 327 bp, synthetic construct; identical to SEQ ID NO: 22
  misc_feature 1..327: note = VL-P of G4H
  source 1..327: mol_type = other DNA

SEQ ID NO: 77 - protein, 249 aa, synthetic construct
  REGION 1..249: note = VH-VL of G4H
EVQLVESGGGLVQPGGSLKLSCAASGFTFNRYAMNWVRQAPGKGLEWVARIRSKYNNYATYYADSVKGRFTISRDDSKNTAYLQMNNLKTEDTAVYYCVRHGNFGNSYLSYFAYWGQGTLVTVSSGGGGSGGGGSGGGGSQTVVTQEPSLTVSPGGTVTLTCGSSTGAVTSGYYPNWVQQKPGQAPRGLIGGTKFLAPGTPARFSGSLLGGKAALTLSGVQPEDEAEYYCALWYSNRWVFGGGTKLTVL

SEQ ID NO: 78 - DNA, 747 bp, synthetic construct
  misc_feature 1..747: note = VH-VL of G4H
  source 1..747: mol_type = other DNA
gaggtgcagctggtcgagtctggaggaggattggtgcagcctggagggtcattgaaactctcatgtgcagcctctggattcaccttcaatcgctacgccatgaactgggtccgccaggctccaggaaagggtttggaatgggttgctcgcataagaagtaaatataataattatgcaacatattatgccgattcagtgaaagggaggttcaccatctccagagatgattcaaaaaacactgcctatctacaaatgaacaacttgaaaactgaggacactgccgtgtactactgtgtgagacatgggaacttcggtaatagctacttatcctacttcgcttactggggccaagggactctggtcaccgtctcctcaggtggtggtggttctggcggcggcggctccggtggtggtggttctcagactgttgtgactcaggaaccttcactcaccgtatcacctggtggaacagtcacactcacttgtggctcctcgactggggctgttacatctggctactacccaaactgggtccaacaaaaaccaggtcaggcaccccgtggtctaataggtgggactaagttcctcgcccccggtactcctgccagattctcaggctccctgcttggaggcaaggctgccctcaccctctcaggggtacagccagaggatgaggcagaatattactgtgctctatggtacagcaaccgctgggtgttcggtggaggaaccaaactgactgtccta

SEQ ID NO: 79 - protein, 249 aa, synthetic construct
  REGION 1..249: note = VH-VL-P of G4H
EVQLLESGGGLVQPGGSLKLSCAASGFTFNRYAMNWVRQAPGKGLEWVARIRSKYNNYATYYADSVKGRFTISRDDSKNTAYLQMNNLKTEDTAVYYCVRHGNFGNSYLSYFAYWGQGTLVTVSSGGGGSGGGGSGGGGSELVVTQEPSLTVSPGGTVTLTCGSSTGAVTSGYYPNWVQQKPGQAPRGLIGGTKFLAPGTPARFSGSLLGGKAALTLSGVQPEDEAEYYCALWYSNRWVFGGGTKLTVL

SEQ ID NO: 80 - DNA, 747 bp, synthetic construct
  misc_feature 1..747: note = VH-VL-P of G4H
  source 1..747: mol_type = other DNA
gaggtgcagctgctcgagtctggaggaggattggtgcagcctggagggtcattgaaactctcatgtgcagcctctggattcaccttcaatcgctacgccatgaactgggtccgccaggctccaggaaagggtttggaatgggttgctcgcataagaagtaaatataataattatgcaacatattatgccgattcagtgaaagggaggttcaccatctccagagatgattcaaaaaacactgcctatctacaaatgaacaacttgaaaactgaggacactgccgtgtactactgtgtgagacatgggaacttcggtaatagctacttatcctacttcgcttactggggccaagggactctggtcaccgtctcctcaggtggtggtggttctggcggcggcggctccggtggtggtggttctgagctcgttgtgactcaggaaccttcactcaccgtatcacctggtggaacagtcacactcacttgtggctcctcgactggggctgttacatctggctactacccaaactgggtccaacaaaaaccaggtcaggcaccccgtggtctaataggtgggactaagttcctcgcccccggtactcctgccagattctcaggctccctgcttggaggcaaggctgccctcaccctctcaggggtacagccagaggatgaggcagaatattactgtgctctatggtacagcaaccgctgggtgttcggtggaggaaccaaactgactgtccta

SEQ ID NO: 81 - protein, 14 aa, synthetic construct
  REGION 1..14: note = CDR-L1 of A2J
RSSTGAVTSGYYPN

SEQ ID NO: 82 - protein, 7 aa, synthetic construct
  REGION 1..7: note = CDR-L2 of A2J
ATDMRPS

SEQ ID NO: 83 - protein, 9 aa, synthetic construct
  REGION 1..9: note = CDR-L3 of A2J
ALWYSNRWV

SEQ ID NO: 84 - protein, 5 aa, synthetic construct
  REGION 1..5: note = CDR-H1 of A2J
VYAMN

SEQ ID NO: 85 - protein, 19 aa, synthetic construct
  REGION 1..19: note = CDR-H2 of A2J
RIRSKYNNYATYYADSVKK

SEQ ID NO: 86 - protein, 14 aa, synthetic construct
  REGION 1..14: note = CDR-H3 of A2J
HGNFGNSYLSWWAY

SEQ ID NO: 87 - protein, 125 aa, synthetic construct
  REGION 1..125: note = VH of A2J
EVQLVESGGGLVQPGGSLKLSCAASGFTFNVYAMNWVRQAPGKGLEWVARIRSKYNNYATYYADSVKKRFTISRDDSKNTAYLQMNNLKTEDTAVYYCVRHGNFGNSYLSWWAYWGQGTLVTVSS

SEQ ID NO: 88 - DNA, 375 bp, synthetic construct
  misc_feature 1..375: note = VH of A2J
  source 1..375: mol_type = other DNA
gaggtgcagctggtcgagtctggaggaggattggtgcagcctggagggtcattgaaactctcatgtgcagcctctggattcaccttcaatgtctacgccatgaactgggtccgccaggctccaggaaagggtttggaatgggttgctcgcataagaagtaaatataataattatgcaacatattatgccgattcagtgaaaaagaggttcaccatctccagagatgattcaaaaaacactgcctatctacaaatgaacaacttgaaaactgaggacactgccgtgtactactgtgtgagacatgggaacttcggtaatagctacttatcctggtgggcttactggggccaagggactctggtcaccgtctcctca

SEQ ID NO: 89 - protein, 109 aa, synthetic construct
  REGION 1..109: note = VL of A2J
QTVVTQEPSLTVSPGGTVTLTCRSSTGAVTSGYYPNWVQQKPGQAPRGLIGATDMRPSGTPARFSGSLLGGKAALTLSGVQPEDEAEYYCALWYSNRWVFGGGTKLTVL

SEQ ID NO: 90 - DNA, 327 bp, synthetic construct
  misc_feature 1..327: note = VL of A2J
  source 1..327: mol_type = other DNA
cagactgttgtgactcaggaaccttcactcaccgtatcacctggtggaacagtcacactcacttgtcgctcctcgactggggctgttacatctggctactacccaaactgggtccaacaaaaaccaggtcaggcaccccgtggtctaataggtgccactgacatgaggccctctggtactcctgccagattctcaggctccctgcttggaggcaaggctgccctcaccctctcaggggtacagccagaggatgaggcagaatattactgtgctctatggtacagcaaccgctgggtgttcggtggaggaaccaaactgactgtccta

SEQ ID NO: 91 - protein, 125 aa, synthetic construct
  REGION 1..125: note = VH-P of A2J
EVQLLESGGGLVQPGGSLKLSCAASGFTFNVYAMNWVRQAPGKGLEWVARIRSKYNNYATYYADSVKKRFTISRDDSKNTAYLQMNNLKTEDTAVYYCVRHGNFGNSYLSWWAYWGQGTLVTVSS

SEQ ID NO: 92 - DNA, 375 bp, synthetic construct
  misc_feature 1..375: note = VH-P of A2J
  source 1..375: mol_type = other DNA
gaggtgcagctgctcgagtctggaggaggattggtgcagcctggagggtcattgaaactctcatgtgcagcctctggattcaccttcaatgtctacgccatgaactgggtccgccaggctccaggaaagggtttggaatgggttgctcgcataagaagtaaatataataattatgcaacatattatgccgattcagtgaaaaagaggttcaccatctccagagatgattcaaaaaacactgcctatctacaaatgaacaacttgaaaactgaggacactgccgtgtactactgtgtgagacatgggaacttcggtaatagctacttatcctggtgggcttactggggccaagggactctggtcaccgtctcctca

SEQ ID NO: 93 - protein, 109 aa, synthetic construct
  REGION 1..109: note = Artificial Sequence
ELVVTQEPSLTVSPGGTVTLTCRSSTGAVTSGYYPNWVQQKPGQAPRGLIGATDMRPSGTPARFSGSLLGGKAALTLSGVQPEDEAEYYCALWYSNRWVFGGGTKLTVL

SEQ ID NO: 94 - DNA, 327 bp, synthetic construct
  misc_feature 1..327: note = VL-P of A2J
  source 1..327: mol_type = other DNA
gagctcgttgtgactcaggaaccttcactcaccgtatcacctggtggaacagtcacactcacttgtcgctcctcgactggggctgttacatctggctactacccaaactgggtccaacaaaaaccaggtcaggcaccccgtggtctaataggtgccactgacatgaggccctctggtactcctgccagattctcaggctccctgcttggaggcaaggctgccctcaccctctcaggggtacagccagaggatgaggcagaatattactgtgctctatggtacagcaaccgctgggtgttcggtggaggaaccaaactgactgtccta

SEQ ID NO: 95 - protein, 249 aa, synthetic construct
  REGION 1..249: note = VH-VL of A2J
EVQLVESGGGLVQPGGSLKLSCAASGFTFNVYAMNWVRQAPGKGLEWVARIRSKYNNYATYYADSVKKRFTISRDDSKNTAYLQMNNLKTEDTAVYYCVRHGNFGNSYLSWWAYWGQGTLVTVSSGGGGSGGGGSGGGGSQTVVTQEPSLTVSPGGTVTLTCRSSTGAVTSGYYPNWVQQKPGQAPRGLIGATDMRPSGTPARFSGSLLGGKAALTLSGVQPEDEAEYYCALWYSNRWVFGGGTKLTVL

SEQ ID NO: 96 - DNA, 747 bp, synthetic construct
  misc_feature 1..747: note = VH-VL of A2J
  source 1..747: mol_type = other DNA
gaggtgcagctggtcgagtctggaggaggattggtgcagcctggagggtcattgaaactctcatgtgcagcctctggattcaccttcaatgtctacgccatgaactgggtccgccaggctccaggaaagggtttggaatgggttgctcgcataagaagtaaatataataattatgcaacatattatgccgattcagtgaaaaagaggttcaccatctccagagatgattcaaaaaacactgcctatctacaaatgaacaacttgaaaactgaggacactgccgtgtactactgtgtgagacatgggaacttcggtaatagctacttatcctggtgggcttactggggccaagggactctggtcaccgtctcctcaggtggtggtggttctggcggcggcggctccggtggtggtggttctcagactgttgtgactcaggaaccttcactcaccgtatcacctggtggaacagtcacactcacttgtcgctcctcgactggggctgttacatctggctactacccaaactgggtccaacaaaaaccaggtcaggcaccccgtggtctaataggtgccactgacatgaggccctctggtactcctgccagattctcaggctccctgcttggaggcaaggctgccctcaccctctcaggggtacagccagaggatgaggcagaatattactgtgctctatggtacagcaaccgctgggtgttcggtggaggaaccaaactgactgtccta

SEQ ID NO: 97 - protein, 249 aa, synthetic construct
  REGION 1..249: note = VH-VL-P of A2J
EVQLLESGGGLVQPGGSLKLSCAASGFTFNVYAMNWVRQAPGKGLEWVARIRSKYNNYATYYADSVKKRFTISRDDSKNTAYLQMNNLKTEDTAVYYCVRHGNFGNSYLSWWAYWGQGTLVTVSSGGGGSGGGGSGGGGSELVVTQEPSLTVSPGGTVTLTCRSSTGAVTSGYYPNWVQQKPGQAPRGLIGATDMRPSGTPARFSGSLLGGKAALTLSGVQPEDEAEYYCALWYSNRWVFGGGTKLTVL

SEQ ID NO: 98 - DNA, 747 bp, synthetic construct
  misc_feature 1..747: note = VH-VL-P of A2J
  source 1..747: mol_type = other DNA
gaggtgcagctgctcgagtctggaggaggattggtgcagcctggagggtcattgaaactctcatgtgcagcctctggattcaccttcaatgtctacgccatgaactgggtccgccaggctccaggaaagggtttggaatgggttgctcgcataagaagtaaatataataattatgcaacatattatgccgattcagtgaaaaagaggttcaccatctccagagatgattcaaaaaacactgcctatctacaaatgaacaacttgaaaactgaggacactgccgtgtactactgtgtgagacatgggaacttcggtaatagctacttatcctggtgggcttactggggccaagggactctggtcaccgtctcctcaggtggtggtggttctggcggcggcggctccggtggtggtggttctgagctcgttgtgactcaggaaccttcactcaccgtatcacctggtggaacagtcacactcacttgtcgctcctcgactggggctgttacatctggctactacccaaactgggtccaacaaaaaccaggtcaggcaccccgtggtctaataggtgccactgacatgaggccctctggtactcctgccagattctcaggctccctgcttggaggcaaggctgccctcaccctctcaggggtacagccagaggatgaggcagaatattactgtgctctatggtacagcaaccgctgggtgttcggtggaggaaccaaactgactgtccta

SEQ ID NO: 99 - protein, 14 aa, synthetic construct
  REGION 1..14: note = CDR-L1 of E1L
GSSTGAVTSGYYPN

SEQ ID NO: 100 - protein, 7 aa, synthetic construct
  REGION 1..7: note = CDR-L2 of E1L
GTKFLAP

SEQ ID NO: 101 - protein, 9 aa, synthetic construct
  REGION 1..9: note = CDR-L3 of E1L
ALWYSNRWV

SEQ ID NO: 102 - protein, 5 aa, synthetic construct
  REGION 1..5: note = CDR-H1 of E1L
KYAMN

SEQ ID NO: 103 - protein, 19 aa, synthetic construct
  REGION 1..19: note = CDR-H2 of E1L
RIRSKYNNYATYYADSVKS

SEQ ID NO: 104 - protein, 14 aa, synthetic construct
  REGION 1..14: note = CDR-H3 of E1L
HGNFGNSYTSYYAY

SEQ ID NO: 105 - protein, 125 aa, synthetic construct
  REGION 1..125: note = VH of E1L
EVQLVESGGGLVQPGGSLKLSCAASGFTFNKYAMNWVRQAPGKGLEWVARIRSKYNNYATYYADSVKSRFTISRDDSKNTAYLQMNNLKTEDTAVYYCVRHGNFGNSYTSYYAYWGQGTLVTVSS

SEQ ID NO: 106 - DNA, 375 bp, synthetic construct
  misc_feature 1..375: note = VH of E1L
  source 1..375: mol_type = other DNA
gaggtgcagctggtcgagtctggaggaggattggtgcagcctggagggtcattgaaactctcatgtgcagcctctggattcaccttcaataagtacgccatgaactgggtccgccaggctccaggaaagggtttggaatgggttgctcgcataagaagtaaatataataattatgcaacatattatgccgattcagtgaaatcgaggttcaccatctccagagatgattcaaaaaacactgcctatctacaaatgaacaacttgaaaactgaggacactgccgtgtactactgtgtgagacatgggaacttcggtaatagctacacatcctactacgcttactggggccaagggactctggtcaccgtctcctca

SEQ ID NO: 107 - protein, 109 aa, synthetic construct; identical to SEQ ID NO: 17
  REGION 1..109: note = VL of E1L

SEQ ID NO: 108 - DNA, 327 bp, synthetic construct; identical to SEQ ID NO: 18
  misc_feature 1..327: note = VL of E1L
  source 1..327: mol_type = other DNA

SEQ ID NO: 109 - protein, 125 aa, synthetic construct
  REGION 1..125: note = VH-P of E1L
EVQLLESGGGLVQPGGSLKLSCAASGFTFNKYAMNWVRQAPGKGLEWVARIRSKYNNYATYYADSVKSRFTISRDDSKNTAYLQMNNLKTEDTAVYYCVRHGNFGNSYTSYYAYWGQGTLVTVSS

SEQ ID NO: 110 - DNA, 375 bp, synthetic construct
  misc_feature 1..375: note = VH-P of E1L
  source 1..375: mol_type = other DNA
gaggtgcagctgctcgagtctggaggaggattggtgcagcctggagggtcattgaaactctcatgtgcagcctctggattcaccttcaataagtacgccatgaactgggtccgccaggctccaggaaagggtttggaatgggttgctcgcataagaagtaaatataataattatgcaacatattatgccgattcagtgaaatcgaggttcaccatctccagagatgattcaaaaaacactgcctatctacaaatgaacaacttgaaaactgaggacactgccgtgtactactgtgtgagacatgggaacttcggtaatagctacacatcctactacgcttactggggccaagggactctggtcaccgtctcctca

SEQ ID NO: 111 - protein, 109 aa, synthetic construct; identical to SEQ ID NO: 21
  REGION 1..109: note = VL-P of E1L

SEQ ID NO: 112 - DNA, 327 bp, synthetic construct; identical to SEQ ID NO: 22
  misc_feature 1..327: note = VL-P of E1L
  source 1..327: mol_type = other DNA

SEQ ID NO: 113 - protein, 249 aa, synthetic construct
  REGION 1..249: note = VH-VL of E1L
EVQLVESGGGLVQPGGSLKLSCAASGFTFNKYAMNWVRQAPGKGLEWVARIRSKYNNYATYYADSVKSRFTISRDDSKNTAYLQMNNLKTEDTAVYYCVRHGNFGNSYTSYYAYWGQGTLVTVSSGGGGSGGGGSGGGGSQTVVTQEPSLTVSPGGTVTLTCGSSTGAVTSGYYPNWVQQKPGQAPRGLIGGTKFLAPGTPARFSGSLLGGKAALTLSGVQPEDEAEYYCALWYSNRWVFGGGTKLTVL

SEQ ID NO: 114 - DNA, 747 bp, synthetic construct
  misc_feature 1..747: note = VH-VL of E1L
  source 1..747: mol_type = other DNA
gaggtgcagctggtcgagtctggaggaggattggtgcagcctggagggtcattgaaactctcatgtgcagcctctggattcaccttcaataagtacgccatgaactgggtccgccaggctccaggaaagggtttggaatgggttgctcgcataagaagtaaatataataattatgcaacatattatgccgattcagtgaaatcgaggttcaccatctccagagatgattcaaaaaacactgcctatctacaaatgaacaacttgaaaactgaggacactgccgtgtactactgtgtgagacatgggaacttcggtaatagctacacatcctactacgcttactggggccaagggactctggtcaccgtctcctcaggtggtggtggttctggcggcggcggctccggtggtggtggttctcagactgttgtgactcaggaaccttcactcaccgtatcacctggtggaacagtcacactcacttgtggctcctcgactggggctgttacatctggctactacccaaactgggtccaacaaaaaccaggtcaggcaccccgtggtctaataggtgggactaagttcctcgcccccggtactcctgccagattctcaggctccctgcttggaggcaaggctgccctcaccctctcaggggtacagccagaggatgaggcagaatattactgtgctctatggtacagcaaccgctgggtgttcggtggaggaaccaaactgactgtccta

SEQ ID NO: 115 - protein, 249 aa, synthetic construct
  REGION 1..249: note = VH-VL-P of E1L
EVQLLESGGGLVQPGGSLKLSCAASGFTFNKYAMNWVRQAPGKGLEWVARIRSKYNNYATYYADSVKSRFTISRDDSKNTAYLQMNNLKTEDTAVYYCVRHGNFGNSYTSYYAYWGQGTLVTVSSGGGGSGGGGSGGGGSELVVTQEPSLTVSPGGTVTLTCGSSTGAVTSGYYPNWVQQKPGQAPRGLIGGTKFLAPGTPARFSGSLLGGKAALTLSGVQPEDEAEYYCALWYSNRWVFGGGTKLTVL

SEQ ID NO: 116 - DNA, 747 bp, synthetic construct
  misc_feature 1..747: note = VH-VL-P of E1L
  source 1..747: mol_type = other DNA
gaggtgcagctgctcgagtctggaggaggattggtgcagcctggagggtcattgaaactctcatgtgcagcctctggattcaccttcaataagtacgccatgaactgggtccgccaggctccaggaaagggtttggaatgggttgctcgcataagaagtaaatataataattatgcaacatattatgccgattcagtgaaatcgaggttcaccatctccagagatgattcaaaaaacactgcctatctacaaatgaacaacttgaaaactgaggacactgccgtgtactactgtgtgagacatgggaacttcggtaatagctacacatcctactacgcttactggggccaagggactctggtcaccgtctcctcaggtggtggtggttctggcggcggcggctccggtggtggtggttctgagctcgttgtgactcaggaaccttcactcaccgtatcacctggtggaacagtcacactcacttgtggctcctcgactggggctgttacatctggctactacccaaactgggtccaacaaaaaccaggtcaggcaccccgtggtctaataggtgggactaagttcctcgcccccggtactcctgccagattctcaggctccctgcttggaggcaaggctgccctcaccctctcaggggtacagccagaggatgaggcagaatattactgtgctctatggtacagcaaccgctgggtgttcggtggaggaaccaaactgactgtccta

SEQ ID NO: 117 - protein, 14 aa, synthetic construct
  REGION 1..14: note = CDR-L1 of E2M
RSSTGAVTSGYYPN

SEQ ID NO: 118 - protein, 7 aa, synthetic construct
  REGION 1..7: note = CDR-L2 of E2M
ATDMRPS

SEQ ID NO: 119 - protein, 9 aa, synthetic construct
  REGION 1..9: note = CDR-L3 of E2M
ALWYSNRWV

SEQ ID NO: 120 - protein, 5 aa, synthetic construct
  REGION 1..5: note = CDR-H1 of E2M
GYAMN

SEQ ID NO: 121 - protein, 19 aa, synthetic construct
  REGION 1..19: note = CDR-H2 of E2M
RIRSKYNNYATYYADSVKE

SEQ ID NO: 122 - protein, 14 aa, synthetic construct
  REGION 1..14: note = CDR-H3 of E2M
HRNFGNSYLSWFAY

SEQ ID NO: 123 - protein, 125 aa, synthetic construct
  REGION 1..125: note = VH of E2M
EVQLVESGGGLVQPGGSLKLSCAASGFTFNGYAMNWVRQAPGKGLEWVARIRSKYNNYATYYADSVKERFTISRDDSKNTAYLQMNNLKTEDTAVYYCVRHRNFGNSYLSWFAYWGQGTLVTVSS

SEQ ID NO: 124 - DNA, 375 bp, synthetic construct
  misc_feature 1..375: note = VH of E2M
  source 1..375: mol_type = other DNA
gaggtgcagctggtcgagtctggaggaggattggtgcagcctggagggtcattgaaactctcatgtgcagcctctggattcaccttcaatggctacgccatgaactgggtccgccaggctccaggaaagggtttggaatgggttgctcgcataagaagtaaatataataattatgcaacatattatgccgattcagtgaaagagaggttcaccatctccagagatgattcaaaaaacactgcctatctacaaatgaacaacttgaaaactgaggacactgccgtgtactactgtgtgagacataggaacttcggtaatagctacttatcctggttcgcttactggggccaagggactctggtcaccgtctcctca

SEQ ID NO: 125 - protein, 109 aa, synthetic construct; identical to SEQ ID NO: 89
  REGION 1..109: note = VL of E2M

SEQ ID NO: 126 - DNA, 327 bp, synthetic construct; identical to SEQ ID NO: 90
  misc_feature 1..327: note = VL of E2M
  source 1..327: mol_type = other DNA

SEQ ID NO: 127 - protein, 125 aa, synthetic construct
  REGION 1..125: note = VH-P of E2M
EVQLLESGGGLVQPGGSLKLSCAASGFTFNGYAMNWVRQAPGKGLEWVARIRSKYNNYATYYADSVKERFTISRDDSKNTAYLQMNNLKTEDTAVYYCVRHRNFGNSYLSWFAYWGQGTLVTVSS

SEQ ID NO: 128 - DNA, 375 bp, synthetic construct
  misc_feature 1..375: note = VH-P of E2M
  source 1..375: mol_type = other DNA
gaggtgcagctgctcgagtctggaggaggattggtgcagcctggagggtcattgaaactctcatgtgcagcctctggattcaccttcaatggctacgccatgaactgggtccgccaggctccaggaaagggtttggaatgggttgctcgcataagaagtaaatataataattatgcaacatattatgccgattcagtgaaagagaggttcaccatctccagagatgattcaaaaaacactgcctatctacaaatgaacaacttgaaaactgaggacactgccgtgtactactgtgtgagacataggaacttcggtaatagctacttatcctggttcgcttactggggccaagggactctggtcaccgtctcctca

SEQ ID NO: 129 - protein, 109 aa, synthetic construct; identical to SEQ ID NO: 93
  REGION 1..109: note = VL-P of E2M

SEQ ID NO: 130 - DNA, 327 bp, synthetic construct; identical to SEQ ID NO: 94
  misc_feature 1..327: note = VL-P of E2M
  source 1..327: mol_type = other DNA

SEQ ID NO: 131 - protein, 249 aa, synthetic construct
  REGION 1..249: note = VH-VL of E2M
EVQLVESGGGLVQPGGSLKLSCAASGFTFNGYAMNWVRQAPGKGLEWVARIRSKYNNYATYYADSVKERFTISRDDSKNTAYLQMNNLKTEDTAVYYCVRHRNFGNSYLSWFAYWGQGTLVTVSSGGGGSGGGGSGGGGSQTVVTQEPSLTVSPGGTVTLTCRSSTGAVTSGYYPNWVQQKPGQAPRGLIGATDMRPSGTPARFSGSLLGGKAALTLSGVQPEDEAEYYCALWYSNRWVFGGGTKLTVL

SEQ ID NO: 132 - DNA, 747 bp, synthetic construct
  misc_feature 1..747: note = VH-VL of E2M
  source 1..747: mol_type = other DNA
gaggtgcagctggtcgagtctggaggaggattggtgcagcctggagggtcattgaaactctcatgtgcagcctctggattcaccttcaatggctacgccatgaactgggtccgccaggctccaggaaagggtttggaatgggttgctcgcataagaagtaaatataataattatgcaacatattatgccgattcagtgaaagagaggttcaccatctccagagatgattcaaaaaacactgcctatctacaaatgaacaacttgaaaactgaggacactgccgtgtactactgtgtgagacataggaacttcggtaatagctacttatcctggttcgcttactggggccaagggactctggtcaccgtctcctcaggtggtggtggttctggcggcggcggctccggtggtggtggttctcagactgttgtgactcaggaaccttcactcaccgtatcacctggtggaacagtcacactcacttgtcgctcctcgactggggctgttacatctggctactacccaaactgggtccaacaaaaaccaggtcaggcaccccgtggtctaataggtgccactgacatgaggccctctggtactcctgccagattctcaggctccctgcttggaggcaaggctgccctcaccctctcaggggtacagccagaggatgaggcagaatattactgtgctctatggtacagcaaccgctgggtgttcggtggaggaaccaaactgactgtccta

SEQ ID NO: 133 - protein, 249 aa, synthetic construct
  REGION 1..249: note = VH-VL-P of E2M
EVQLLESGGGLVQPGGSLKLSCAASGFTFNGYAMNWVRQAPGKGLEWVARIRSKYNNYATYYADSVKERFTISRDDSKNTAYLQMNNLKTEDTAVYYCVRHRNFGNSYLSWFAYWGQGTLVTVSSGGGGSGGGGSGGGGSELVVTQEPSLTVSPGGTVTLTCRSSTGAVTSGYYPNWVQQKPGQAPRGLIGATDMRPSGTPARFSGSLLGGKAALTLSGVQPEDEAEYYCALWYSNRWVFGGGTKLTVL

SEQ ID NO: 134 - DNA, 747 bp, synthetic construct
  misc_feature 1..747: note = VH-VL-P of E2M
  source 1..747: mol_type = other DNA
gaggtgcagctgctcgagtctggaggaggattggtgcagcctggagggtcattgaaactctcatgtgcagcctctggattcaccttcaatggctacgccatgaactgggtccgccaggctccaggaaagggtttggaatgggttgctcgcataagaagtaaatataataattatgcaacatattatgccgattcagtgaaagagaggttcaccatctccagagatgattcaaaaaacactgcctatctacaaatgaacaacttgaaaactgaggacactgccgtgtactactgtgtgagacataggaacttcggtaatagctacttatcctggttcgcttactggggccaagggactctggtcaccgtctcctcaggtggtggtggttctggcggcggcggctccggtggtggtggttctgagctcgttgtgactcaggaaccttcactcaccgtatcacctggtggaacagtcacactcacttgtcgctcctcgactggggctgttacatctggctactacccaaactgggtccaacaaaaaccaggtcaggcaccccgtggtctaataggtgccactgacatgaggccctctggtactcctgccagattctcaggctccctgcttggaggcaaggctgccctcaccctctcaggggtacagccagaggatgaggcagaatattactgtgctctatggtacagcaaccgctgggtgttcggtggaggaaccaaactgactgtccta

SEQ ID NO: 135 - protein, 14 aa, synthetic construct
  REGION 1..14: note = CDR-L1 of F7O
GSSTGAVTSGYYPN

SEQ ID NO: 136 - protein, 7 aa, synthetic construct
  REGION 1..7: note = CDR-L2 of F7O
GTKFLAP

SEQ ID NO: 137 - protein, 9 aa, synthetic construct
  REGION 1..9: note = CDR-L3 of F7O
ALWYSNRWV

SEQ ID NO: 138 - protein, 5 aa, synthetic construct
  REGION 1..5: note = CDR-H1 of F7O
VYAMN

SEQ ID NO: 139 - protein, 19 aa, synthetic construct
  REGION 1..19: note = CDR-H2 of F7O
RIRSKYNNYATYYADSVKK

SEQ ID NO: 140 - protein, 14 aa, synthetic construct
  REGION 1..14: note = CDR-H3 of F7O
HGNFGNSYISWWAY

SEQ ID NO: 141 - protein, 125 aa, synthetic construct
  REGION 1..125: note = VH of F7O
EVQLVESGGGLVQPGGSLKLSCAASGFTFNVYAMNWVRQAPGKGLEWVARIRSKYNNYATYYADSVKKRFTISRDDSKNTAYLQMNNLKTEDTAVYYCVRHGNFGNSYISWWAYWGQGTLVTVSS

SEQ ID NO: 142 - DNA, 375 bp, synthetic construct
  misc_feature 1..375: note = VH of F7O
  source 1..375: mol_type = other DNA
gaggtgcagctggtcgagtctggaggaggattggtgcagcctggagggtcattgaaactctcatgtgcagcctctggattcaccttcaatgtgtacgccatgaactgggtccgccaggctccaggaaagggtttggaatgggttgctcgcataagaagtaaatataataattatgcaacatattatgccgattcagtgaaaaagaggttcaccatctccagagatgattcaaaaaacactgcctatctacaaatgaacaacttgaaaactgaggacactgccgtgtactactgtgtgagacatgggaacttcggtaatagctacatatcctggtgggcttactggggccaagggactctggtcaccgtctcctca

SEQ ID NO: 143 - protein, 109 aa, synthetic construct; identical to SEQ ID NO: 17
  REGION 1..109: note = VL of F7O

SEQ ID NO: 144 - DNA, 327 bp, synthetic construct; identical to SEQ ID NO: 18
  misc_feature 1..327: note = VL of F7O
  source 1..327: mol_type = other DNA

SEQ ID NO: 145 - protein, 125 aa, synthetic construct
  REGION 1..125: note = VH-P of F7O
EVQLLESGGGLVQPGGSLKLSCAASGFTFNVYAMNWVRQAPGKGLEWVARIRSKYNNYATYYADSVKKRFTISRDDSKNTAYLQMNNLKTEDTAVYYCVRHGNFGNSYISWWAYWGQGTLVTVSS

SEQ ID NO: 146 - DNA, 375 bp, synthetic construct
  misc_feature 1..375: note = VH-P of F7O
  source 1..375: mol_type = other DNA
gaggtgcagctgctcgagtctggaggaggattggtgcagcctggagggtcattgaaactctcatgtgcagcctctggattcaccttcaatgtgtacgccatgaactgggtccgccaggctccaggaaagggtttggaatgggttgctcgcataagaagtaaatataataattatgcaacatattatgccgattcagtgaaaaagaggttcaccatctccagagatgattcaaaaaacactgcctatctacaaatgaacaacttgaaaactgaggacactgccgtgtactactgtgtgagacatgggaacttcggtaatagctacatatcctggtgggcttactggggccaagggactctggtcaccgtctcctca

SEQ ID NO: 147 - protein, 109 aa, synthetic construct; identical to SEQ ID NO: 21
  REGION 1..109: note = VL-P of F7O

SEQ ID NO: 148 - DNA, 327 bp, synthetic construct; identical to SEQ ID NO: 22
  misc_feature 1..327: note = VL-P of F7O
  source 1..327: mol_type = other DNA

SEQ ID NO: 149 - protein, 249 aa, synthetic construct
  REGION 1..249: note = VH-VL of F7O
EVQLVESGGGLVQPGGSLKLSCAASGFTFNVYAMNWVRQAPGKGLEWVARIRSKYNNYATYYADSVKKRFTISRDDSKNTAYLQMNNLKTEDTAVYYCVRHGNFGNSYISWWAYWGQGTLVTVSSGGGGSGGGGSGGGGSQTVVTQEPSLTVSPGGTVTLTCGSSTGAVTSGYYPNWVQQKPGQAPRGLIGGTKFLAPGTPARFSGSLLGGKAALTLSGVQPEDEAEYYCALWYSNRWVFGGGTKLTVL

SEQ ID NO: 150 - DNA, 747 bp, synthetic construct
  misc_feature 1..747: note = VH-VL of F7O
  source 1..747: mol_type = other DNA
gaggtgcagctggtcgagtctggaggaggattggtgcagcctggagggtcattgaaactctcatgtgcagcctctggattcaccttcaatgtgtacgccatgaactgggtccgccaggctccaggaaagggtttggaatgggttgctcgcataagaagtaaatataataattatgcaacatattatgccgattcagtgaaaaagaggttcaccatctccagagatgattcaaaaaacactgcctatctacaaatgaacaacttgaaaactgaggacactgccgtgtactactgtgtgagacatgggaacttcggtaatagctacatatcctggtgggcttactggggccaagggactctggtcaccgtctcctcaggtggtggtggttctggcggcggcggctccggtggtggtggttctcagactgttgtgactcaggaaccttcactcaccgtatcacctggtggaacagtcacactcacttgtggctcctcgactggggctgttacatctggctactacccaaactgggtccaacaaaaaccaggtcaggcaccccgtggtctaataggtgggactaagttcctcgcccccggtactcctgccagattctcaggctccctgcttggaggcaaggctgccctcaccctctcaggggtacagccagaggatgaggcagaatattactgtgctctatggtacagcaaccgctgggtgttcggtggaggaaccaaactgactgtccta

SEQ ID NO: 151 - protein, 249 aa, synthetic construct
  REGION 1..249: note = VH-VL-P of F7O
EVQLLESGGGLVQPGGSLKLSCAASGFTFNVYAMNWVRQAPGKGLEWVARIRSKYNNYATYYADSVKKRFTISRDDSKNTAYLQMNNLKTEDTAVYYCVRHGNFGNSYISWWAYWGQGTLVTVSSGGGGSGGGGSGGGGSELVVTQEPSLTVSPGGTVTLTCGSSTGAVTSGYYPNWVQQKPGQAPRGLIGGTKFLAPGTPARFSGSLLGGKAALTLSGVQPEDEAEYYCALWYSNRWVFGGGTKLTVL

SEQ ID NO: 152 - DNA, 747 bp, synthetic construct
  misc_feature 1..747: note = VH-VL-P of F7O
  source 1..747: mol_type = other DNA
gaggtgcagctgctcgagtctggaggaggattggtgcagcctggagggtcattgaaactctcatgtgcagcctctggattcaccttcaatgtgtacgccatgaactgggtccgccaggctccaggaaagggtttggaatgggttgctcgcataagaagtaaatataataattatgcaacatattatgccgattcagtgaaaaagaggttcaccatctccagagatgattcaaaaaacactgcctatctacaaatgaacaacttgaaaactgaggacactgccgtgtactactgtgtgagacatgggaacttcggtaatagctacatatcctggtgggcttactggggccaagggactctggtcaccgtctcctcaggtggtggtggttctggcggcggcggctccggtggtggtggttctgagctcgttgtgactcaggaaccttcactcaccgtatcacctggtggaacagtcacactcacttgtggctcctcgactggggctgttacatctggctactacccaaactgggtccaacaaaaaccaggtcaggcaccccgtggtctaataggtgggactaagttcctcgcccccggtactcctgccagattctcaggctccctgcttggaggcaaggctgccctcaccctctcaggggtacagccagaggatgaggcagaatattactgtgctctatggtacagcaaccgctgggtgttcggtggaggaaccaaactgactgtccta

SEQ ID NO: 153 - protein, 14 aa, synthetic construct
  REGION 1..14: note = CDR-L1 of F12Q
GSSTGAVTSGNYPN

SEQ ID NO: 154 - protein, 7 aa, synthetic construct
  REGION 1..7: note = CDR-L2 of F12Q
GTKFLAP

SEQ ID NO: 155 - protein, 9 aa, synthetic construct
  REGION 1..9: note = CDR-L3 of F12Q
VLWYSNRWV

SEQ ID NO: 156 - protein, 5 aa, synthetic construct
  REGION 1..5: note = CDR-H1 of F12Q
SYAMN

SEQ ID NO: 157 - protein, 19 aa, synthetic construct
  REGION 1..19: note = CDR-H2 of F12Q
RIRSKYNNYATYYADSVKG

SEQ ID NO: 158 - protein, 14 aa, synthetic construct
  REGION 1..14: note = CDR-H3 of F12Q
HGNFGNSYVSWWAY

SEQ ID NO: 159 - protein, 125 aa, synthetic construct
  REGION 1..125: note = VH of F12Q
EVQLVESGGGLVQPGGSLKLSCAASGFTFNSYAMNWVRQAPGKGLEWVARIRSKYNNYATYYADSVKGRFTISRDDSKNTAYLQMNNLKTEDTAVYYCVRHGNFGNSYVSWWAYWGQGTLVTVSS

SEQ ID NO: 160 - DNA, 375 bp, synthetic construct
  misc_feature 1..375: note = VH of F12Q
  source 1..375: mol_type = other DNA
gaggtgcagctggtcgagtctggaggaggattggtgcagcctggagggtcattgaaactctcatgtgcagcctctggattcaccttcaatagctacgccatgaactgggtccgccaggctccaggaaagggtttggaatgggttgctcgcataagaagtaaatataataattatgcaacatattatgccgattcagtgaaaggcaggttcaccatctccagagatgattcaaaaaacactgcctatctacaaatgaacaacttgaaaactgaggacactgccgtgtactactgtgtgagacatgggaacttcggtaatagctacgtttcctggtgggcttactggggccaagggactctggtcaccgtctcctca

SEQ ID NO: 161 - protein, 109 aa, synthetic construct
  REGION 1..109: note = VL of F12Q
QTVVTQEPSLTVSPGGTVTLTCGSSTGAVTSGNYPNWVQQKPGQAPRGLIGGTKFLAPGTPARFSGSLLGGKAALTLSGVQPEDEAEYYCVLWYSNRWVFGGGTKLTVL

SEQ ID NO: 162 - DNA, 327 bp, synthetic construct
  misc_feature 1..327: note = VL of F12Q
  source 1..327: mol_type = other DNA
cagactgttgtgactcaggaaccttcactcaccgtatcacctggtggaacagtcacactcacttgtggctcctcgactggggctgttacatctggcaactacccaaactgggtccaacaaaaaccaggtcaggcaccccgtggtctaataggtgggactaagttcctcgcccccggtactcctgccagattctcaggctccctgcttggaggcaaggctgccctcaccctctcaggggtacagccagaggatgaggcagaatattactgtgttctatggtacagcaaccgctgggtgttcggtggaggaaccaaactgactgtccta

SEQ ID NO: 163 - protein, 125 aa, synthetic construct
  REGION 1..125: note = VH-P of F12Q
EVQLLESGGGLVQPGGSLKLSCAASGFTFNSYAMNWVRQAPGKGLEWVARIRSKYNNYATYYADSVKGRFTISRDDSKNTAYLQMNNLKTEDTAVYYCVRHGNFGNSYVSWWAYWGQGTLVTVSS

SEQ ID NO: 164 - DNA, 375 bp, synthetic construct
  misc_feature 1..375: note = VH-P of F12Q
  source 1..375: mol_type = other DNA
gaggtgcagctgctcgagtctggaggaggattggtgcagcctggagggtcattgaaactctcatgtgcagcctctggattcaccttcaatagctacgccatgaactgggtccgccaggctccaggaaagggtttggaatgggttgctcgcataagaagtaaatataataattatgcaacatattatgccgattcagtgaaaggcaggttcaccatctccagagatgattcaaaaaacactgcctatctacaaatgaacaacttgaaaactgaggacactgccgtgtactactgtgtgagacatgggaacttcggtaatagctacgtttcctggtgggcttactggggccaagggactctggtcaccgtctcctca

SEQ ID NO: 165 - protein, 109 aa, synthetic construct
  REGION 1..109: note = VL-P of F12Q
ELVVTQEPSLTVSPGGTVTLTCGSSTGAVTSGNYPNWVQQKPGQAPRGLIGGTKFLAPGTPARFSGSLLGGKAALTLSGVQPEDEAEYYCVLWYSNRWVFGGGTKLTVL

SEQ ID NO: 166 - DNA, 327 bp, synthetic construct
  misc_feature 1..327: note = VL-P of F12Q
  source 1..327: mol_type = other DNA
gagctcgttgtgactcaggaaccttcactcaccgtatcacctggtggaacagtcacactcacttgtggctcctcgactggggctgttacatctggcaactacccaaactgggtccaacaaaaaccaggtcaggcaccccgtggtctaataggtgggactaagttcctcgcccccggtactcctgccagattctcaggctccctgcttggaggcaaggctgccctcaccctctcaggggtacagccagaggatgaggcagaatattactgtgttctatggtacagcaaccgctgggtgttcggtggaggaaccaaactgactgtccta

SEQ ID NO: 167 - protein, 249 aa, synthetic construct
  REGION 1..249: note = VH-VL of F12Q
EVQLVESGGGLVQPGGSLKLSCAASGFTFNSYAMNWVRQAPGKGLEWVARIRSKYNNYATYYADSVKGRFTISRDDSKNTAYLQMNNLKTEDTAVYYCVRHGNFGNSYVSWWAYWGQGTLVTVSSGGGGSGGGGSGGGGSQTVVTQEPSLTVSPGGTVTLTCGSSTGAVTSGNYPNWVQQKPGQAPRGLIGGTKFLAPGTPARFSGSLLGGKAALTLSGVQPEDEAEYYCVLWYSNRWVFGGGTKLTVL

SEQ ID NO: 168 - DNA, 747 bp, synthetic construct
  misc_feature 1..747: note = VH-VL of F12Q
  source 1..747: mol_type = other DNA
gaggtgcagctggtcgagtctggaggaggattggtgcagcctggagggtcattgaaactctcatgtgcagcctctggattcaccttcaatagctacgccatgaactgggtccgccaggctccaggaaagggtttggaatgggttgctcgcataagaagtaaatataataattatgcaacatattatgccgattcagtgaaaggcaggttcaccatctccagagatgattcaaaaaacactgcctatctacaaatgaacaacttgaaaactgaggacactgccgtgtactactgtgtgagacatgggaacttcggtaatagctacgtttcctggtgggcttactggggccaagggactctggtcaccgtctcctcaggtggtggtggttctggcggcggcggctccggtggtggtggttctcagactgttgtgactcaggaaccttcactcaccgtatcacctggtggaacagtcacactcacttgtggctcctcgactggggctgttacatctggcaactacccaaactgggtccaacaaaaaccaggtcaggcaccccgtggtctaataggtgggactaagttcctcgcccccggtactcctgccagattctcaggctccctgcttggaggcaaggctgccctcaccctctcaggggtacagccagaggatgaggcagaatattactgtgttctatggtacagcaaccgctgggtgttcggtggaggaaccaaactgactgtccta

SEQ ID NO: 169 - protein, 249 aa, synthetic construct
  REGION 1..249: note = VH-VL-P of F12Q
EVQLLESGGGLVQPGGSLKLSCAASGFTFNSYAMNWVRQAPGKGLEWVARIRSKYNNYATYYADSVKGRFTISRDDSKNTAYLQMNNLKTEDTAVYYCVRHGNFGNSYVSWWAYWGQGTLVTVSSGGGGSGGGGSGGGGSELVVTQEPSLTVSPGGTVTLTCGSSTGAVTSGNYPNWVQQKPGQAPRGLIGGTKFLAPGTPARFSGSLLGGKAALTLSGVQPEDEAEYYCVLWYSNRWVFGGGTKLTVL

SEQ ID NO: 170 - DNA, 747 bp, synthetic construct
  misc_feature 1..747: note = VH-VL-P of F12Q
  source 1..747: mol_type = other DNA
gaggtgcagctgctcgagtctggaggaggattggtgcagcctggagggtcattgaaactctcatgtgcagcctctggattcaccttcaatagctacgccatgaactgggtccgccaggctccaggaaagggtttggaatgggttgctcgcataagaagtaaatataataattatgcaacatattatgccgattcagtgaaaggcaggttcaccatctccagagatgattcaaaaaacactgcctatctacaaatgaacaacttgaaaactgaggacactgccgtgtactactgtgtgagacatgggaacttcggtaatagctacgtttcctggtgggcttactggggccaagggactctggtcaccgtctcctcaggtggtggtggttctggcggcggcggctccggtggtggtggttctgagctcgttgtgactcaggaaccttcactcaccgtatcacctggtggaacagtcacactcacttgtggctcctcgactggggctgttacatctggcaactacccaaactgggtccaacaaaaaccaggtcaggcaccccgtggtctaataggtgggactaagttcctcgcccccggtactcctgccagattctcaggctccctgcttggaggcaaggctgccctcaccctctcaggggtacagccagaggatgaggcagaatattactgtgttctatggtacagcaaccgctgggtgttcggtggaggaaccaaactgactgtccta

SEQ ID NO: 171 - protein, 14 aa, synthetic construct
  REGION 1..14: note = CDR-L1 of I2C
GSSTGAVTSGNYPN

SEQ ID NO: 172 - protein, 7 aa, synthetic construct
  REGION 1..7: note = CDR-L2 of I2C
GTKFLAP

SEQ ID NO: 173 - protein, 9 aa, synthetic construct
  REGION 1..9: note = CDR-L3 of I2C
VLWYSNRWV

SEQ ID NO: 174 - protein, 5 aa, synthetic construct
  REGION 1..5: note = CDR-H1 of I2C
KYAMN

SEQ ID NO: 175 - protein, 19 aa, synthetic construct
  REGION 1..19: note = CDR-H2 of I2C
RIRSKYNNYATYYADSVKD

SEQ ID NO: 176 - protein, 14 aa, synthetic construct
  REGION 1..14: note = CDR-H3 of I2C
HGNFGNSYISYWAY

SEQ ID NO: 177 - protein, 125 aa, synthetic construct; identical to SEQ ID NO: 33
  REGION 1..125: note = VH of I2C

SEQ ID NO: 178 - DNA, 375 bp, synthetic construct; identical to SEQ ID NO: 34
  misc_feature 1..375: note = VH of I2C
  source 1..375: mol_type = other DNA

SEQ ID NO: 179 - protein, 109 aa, synthetic construct; identical to SEQ ID NO: 161
  REGION 1..109: note = VL of I2C

SEQ ID NO: 180 - DNA, 327 bp, synthetic construct; identical to SEQ ID NO: 162
  misc_feature 1..327: note = VL of I2C
  source 1..327: mol_type = other DNA

SEQ ID NO: 181 - protein, 125 aa, synthetic construct; identical to SEQ ID NO: 37
  REGION 1..125: note = VH-P of I2C

SEQ ID NO: 182 - DNA, 375 bp, synthetic construct; identical to SEQ ID NO: 38
  misc_feature 1..375: note = VH-P of I2C
  source 1..375: mol_type = other DNA

SEQ ID NO: 183 - protein, 109 aa, synthetic construct; identical to SEQ ID NO: 165
  REGION 1..109: note = VL-P of I2C

SEQ ID NO: 184 - DNA, 327 bp, synthetic construct; identical to SEQ ID NO: 166
  misc_feature 1..327: note = VL-P of I2C
  source 1..327: mol_type = other DNA

SEQ ID NO: 185 - protein, 249 aa, synthetic construct
  REGION 1..249: note = VH-VL of I2C
EVQLVESGGGLVQPGGSLKLSCAASGFTFNKYAMNWVRQAPGKGLEWVARIRSKYNNYATYYADSVKDRFTISRDDSKNTAYLQMNNLKTEDTAVYYCVRHGNFGNSYISYWAYWGQGTLVTVSSGGGGSGGGGSGGGGSQTVVTQEPSLTVSPGGTVTLTCGSSTGAVTSGNYPNWVQQKPGQAPRGLIGGTKFLAPGTPARFSGSLLGGKAALTLSGVQPEDEAEYYCVLWYSNRWVFGGGTKLTVL

SEQ ID NO: 186 - DNA, 747 bp, synthetic construct
  misc_feature 1..747: note = VH-VL of I2C
  source 1..747: mol_type = other DNA
gaggtgcagctggtcgagtctggaggaggattggtgcagcctggagggtcattgaaactctcatgtgcagcctctggattcaccttcaataagtacgccatgaactgggtccgccaggctccaggaaagggtttggaatgggttgctcgcataagaagtaaatataataattatgcaacatattatgccgattcagtgaaagacaggttcaccatctccagagatgattcaaaaaacactgcctatctacaaatgaacaacttgaaaactgaggacactgccgtgtactactgtgtgagacatgggaacttcggtaatagctacatatcctactgggcttactggggccaagggactctggtcaccgtctcctcaggtggtggtggttctggcggcggcggctccggtggtggtggttctcagactgttgtgactcaggaaccttcactcaccgtatcacctggtggaacagtcacactcacttgtggctcctcgactggggctgttacatctggcaactacccaaactgggtccaacaaaaaccaggtcaggcaccccgtggtctaataggtgggactaagttcctcgcccccggtactcctgccagattctcaggctccctgcttggaggcaaggctgccctcaccctctcaggggtacagccagaggatgaggcagaatattactgtgttctatggtacagcaaccgctgggtgttcggtggaggaaccaaactgactgtccta

SEQ ID NO: 187 - protein, 249 aa, synthetic construct
  REGION 1..249: note = VH-VL-P of I2C
EVQLLESGGGLVQPGGSLKLSCAASGFTFNKYAMNWVRQAPGKGLEWVARIRSKYNNYATYYADSVKDRFTISRDDSKNTAYLQMNNLKTEDTAVYYCVRHGNFGNSYISYWAYWGQGTLVTVSSGGGGSGGGGSGGGGSELVVTQEPSLTVSPGGTVTLTCGSSTGAVTSGNYPNWVQQKPGQAPRGLIGGTKFLAPGTPARFSGSLLGGKAALTLSGVQPEDEAEYYCVLWYSNRWVFGGGTKLTVL

SEQ ID NO: 188 - DNA, 747 bp, synthetic construct
  misc_feature 1..747: note = VH-VL-P of I2C
  source 1..747: mol_type = other DNA
gaggtgcagctgctcgagtctggaggaggattggtgcagcctggagggtcattgaaactctcatgtgcagcctctggattcaccttcaataagtacgccatgaactgggtccgccaggctccaggaaagggtttggaatgggttgctcgcataagaagtaaatataataattatgcaacatattatgccgattcagtgaaagacaggttcaccatctccagagatgattcaaaaaacactgcctatctacaaatgaacaacttgaaaactgaggacactgccgtgtactactgtgtgagacatgggaacttcggtaatagctacatatcctactgggcttactggggccaagggactctggtcaccgtctcctcaggtggtggtggttctggcggcggcggctccggtggtggtggttctgagctcgttgtgactcaggaaccttcactcaccgtatcacctggtggaacagtcacactcacttgtggctcctcgactggggctgttacatctggcaactacccaaactgggtccaacaaaaaccaggtcaggcaccccgtggtctaataggtgggactaagttcctcgcccccggtactcctgccagattctcaggctccctgcttggaggcaaggctgccctcaccctctcaggggtacagccagaggatgaggcagaatattactgtgttctatggtacagcaaccgctgggtgttcggtggaggaaccaaactgactgtccta

SEQ ID NO: 189 - protein, 500 aa, synthetic construct
  REGION 1..500: note = MCSP-G4 VH-VL x H2C VH-VL
QVQLVQSGAEVKRPGASMKVSCKASGYTFTNYYIHWVRQAPGQGLEWMGWINPNSGATNYAQKFQGRVTMTRDTSTSTVYMELSSLRSEDTAVYYCAKSWVSWFASWGQGTLVTVSSGGGGSGGGGSGGGGSDIVMTQSPDSLAVSLGERATINCKSSQSVLNSSNNRNYLAWYQQKPGQPPKLLIYWASTRESGVPDRFSGSGSGTDFTLTISGLQAEDVAVYYCQQHYSTPFTFGPGTKVDIKSGGGGSEVQLVESGGGLVQPGGSLKLSCAASGFTFNKYAMNWVRQAPGKGLEWVARIRSKYNNYATYYADSVKDRFTISRDDSKNTAYLQMNNLKTEDTAVYYCVRHGNFGNSYISYWAYWGQGTLVTVSSGGGGSGGGGSGGGGSQTVVTQEPSLTVSPGGTVTLTCGSSTGAVTSGYYPNWVQQKPGQAPRGLIGGTKFLAPGTPARFSGSLLGGKAALTLSGVQPEDEAEYYCALWYSNRWVFGGGTKLTVL

SEQ ID NO: 190 - DNA, 1500 bp, synthetic construct
  misc_feature 1..1500: note = MCSP-G4 VH-VL x H2C VH-VL
  source 1..1500: mol_type = other DNA
caggtgcagctggtccagtctggggctgaggtgaagaggcctggggcctcaatgaaggtctcctgcaaggcttctgggtacaccttcaccaactactatatacactgggtgcgacaggcccctggacaaggtcttgagtggatgggttggatcaaccctaacagtggtgccacaaactatgcacagaagttccagggcagagtcaccatgaccagggacacgtccacgagcacagtctacatggagctgagcagcctgagatctgaggacacggccgtgtattactgtgcgaaatcctgggtctcctggtttgcttcctggggtcaaggaaccttggtcaccgtctcctcaggtggtggtggttctggcggcggcggctccggtggtggtggttctgatatcgtgatgacccagtctccagactccctggctgtgtctctgggcgagagggccaccatcaactgcaagtccagccagagtgttttaaacagctccaacaataggaactacttagcttggtaccagcagaaaccaggacagcctcctaagctgctcatttactgggcatctacccgggaatccggggtccctgaccgattcagtggcagcgggtctgggacagatttcactctcaccatcagtggcctgcaggctgaagatgtggcagtttattactgtcagcaacattatagtactccattcacttttggccctgggaccaaagtggatatcaaatccggaggtggtggatccgaggtgcagctggtcgagtctggaggaggattggtgcagcctggagggtcattgaaactctcatgtgcagcctctggattcaccttcaataagtacgccatgaactgggtccgccaggctccaggaaagggtttggaatgggttgctcgcataagaagtaaatataataattatgcaacatattatgccgattcagtgaaagacaggttcaccatctccagagatgattcaaaaaacactgcctatctacaaatgaacaacttgaaaactgaggacactgccgtgtactactgtgtgagacatgggaacttcggtaatagctacatatcctactgggcttactggggccaagggactctggtcaccgtctcctcaggtggtggtggttctggcggcggcggctccggtggtggtggttctcagactgttgtgactcaggaaccttcactcaccgtatcacctggtggaacagtcacactcacttgtggctcctcgactggggctgttacatctggctactacccaaactgggtccaacaaaaaccaggtcaggcaccccgtggtctaataggtgggactaagttcctcgcccccggtactcctgccagattctcaggctccctgcttggaggcaaggctgccctcaccctctcaggggtacagccagaggatgaggcagaatattactgtgctctatggtacagcaaccgctgggtgttcggtggaggaaccaaactgactgtccta

SEQ ID NO: 191 - protein, 500 aa, synthetic construct
  REGION 1..500: note = MCSP-G4 VH-VL x F12Q VH-VL
QVQLVQSGAEVKRPGASMKVSCKASGYTFTNYYIHWVRQAPGQGLEWMGWINPNSGATNYAQKFQGRVTMTRDTSTSTVYMELSSLRSEDTAVYYCAKSWVSWFASWGQGTLVTVSSGGGGSGGGGSGGGGSDIVMTQSPDSLAVSLGERATINCKSSQSVLNSSNNRNYLAWYQQKPGQPPKLLIYWASTRESGVPDRFSGSGSGTDFTLTISGLQAEDVAVYYCQQHYSTPFTFGPGTKVDIKSGGGGSEVQLVESGGGLVQPGGSLKLSCAASGFTFNSYAMNWVRQAPGKGLEWVARIRSKYNNYATYYADSVKGRFTISRDDSKNTAYLQMNNLKTEDTAVYYCVRHGNFGNSYVSWWAYWGQGTLVTVSSGGGGSGGGGSGGGGSQTVVTQEPSLTVSPGGTVTLTCGSSTGAVTSGNYPNWVQQKPGQAPRGLIGGTKFLAPGTPARFSGSLLGGKAALTLSGVQPEDEAEYYCVLWYSNRWVFGGGTKLTVL

SEQ ID NO: 192 - DNA, 1500 bp, synthetic construct
  misc_feature 1..1500: note = MCSP-G4 VH-VL x F12Q VH-VL
  source 1..1500: mol_type = other DNA
caggtgcagctggtccagtctggggctgaggtgaagaggcctggggcctcaatgaaggtctcctgcaaggcttctgggtacaccttcaccaactactatatacactgggtgcgacaggcccctggacaaggtcttgagtggatgggttggatcaaccctaacagtggtgccacaaactatgcacagaagttccagggcagagtcaccatgaccagggacacgtccacgagcacagtctacatggagctgagcagcctgagatctgaggacacggccgtgtattactgtgcgaaatcctgggtctcctggtttgcttcctggggtcaaggaaccttggtcaccgtctcctcaggtggtggtggttctggcggcggcggctccggtggtggtggttctgatatcgtgatgacccagtctccagactccctggctgtgtctctgggcgagagggccaccatcaactgcaagtccagccagagtgttttaaacagctccaacaataggaactacttagcttggtaccagcagaaaccaggacagcctcctaagctgctcatttactgggcatctacccgggaatccggggtccctgaccgattcagtggcagcgggtctgggacagatttcactctcaccatcagtggcctgcaggctgaagatgtggcagtttattactgtcagcaacattatagtactccattcacttttggccctgggaccaaagtggatatcaaatccggaggtggtggatccgaggtgcagctggtcgagtctggaggaggattggtgcagcctggagggtcattgaaactctcatgtgcagcctctggattcaccttcaatagctacgccatgaactgggtccgccaggctccaggaaagggtttggaatgggttgctcgcataagaagtaaatataataattatgcaacatattatgccgattcagtgaaaggcaggttcaccatctccagagatgattcaaaaaacactgcctatctacaaatgaacaacttgaaaactgaggacactgccgtgtactactgtgtgagacatgggaacttcggtaatagctacgtttcctggtgggcttactggggccaagggactctggtcaccgtctcctcaggtggtggtggttctggcggcggcggctccggtggtggtggttctcagactgttgtgactcaggaaccttcactcaccgtatcacctggtggaacagtcacactcacttgtggctcctcgactggggctgttacatctggcaactacccaaactgggtccaacaaaaaccaggtcaggcaccccgtggtctaataggtgggactaagttcctcgcccccggtactcctgccagattctcaggctccctgcttggaggcaaggctgccctcaccctctcaggggtacagccagaggatgaggcagaatattactgtgttctatggtacagcaaccgctgggtgttcggtggaggaaccaaactgactgtccta

SEQ ID NO: 193 - protein, 500 aa, synthetic construct
  REGION 1..500: note = MCSP-G4 VH-VL-P x F6A VH-VL-P
QVQLVQSGAEVKRPGASMKVSCKASGYTFTNYYIHWVRQAPGQGLEWMGWINPNSGATNYAQKFQGRVTMTRDTSTSTVYMELSSLRSEDTAVYYCAKSWVSWFASWGQGTLVTVSSGGGGSGGGGSGGGGSDIVMTQSPDSLAVSLGERATINCKSSQSVLNSSNNRNYLAWYQQKPGQPPKLLIYWASTRESGVPDRFSGSGSGTDFTLTISGLQAEDVAVYYCQQHYSTPFTFGPGTKVDIKSGGGGSEVQLVESGGGLVQPGGSLKLSCAASGFTFNKYAMNWVRQAPGKGLEWVARIRSKYNNYATYYADSVKDRFTISRDDSKNTAYLQMNNLKTEDTAVYYCVRHGNFGNSYISYWAYWGQGTLVTVSSGGGGSGGGGSGGGGSQTVVTQEPSLTVSPGGTVTLTCGSSTGAVTSGNYPNWVQQKPGQAPRGLIGGTKFLAPGTPARFSGSLLGGKAALTLSGVQPEDEAEYYCVLWYSNRWVFGGGTKLTVL

SEQ ID NO: 194 - DNA, 1500 bp, synthetic construct
  misc_feature 1..1500: note = MCSP-G4 VH-VL-P x F6A VH-VL-P
  source 1..1500: mol_type = other DNA
caggtgcagctggtccagtctggggctgaggtgaagaggcctggggcctcaatgaaggtctcctgcaaggcttctgggtacaccttcaccaactactatatacactgggtgcgacaggcccctggacaaggtcttgagtggatgggttggatcaaccctaacagtggtgccacaaactatgcacagaagttccagggcagagtcaccatgaccagggacacgtccacgagcacagtctacatggagctgagcagcctgagatctgaggacacggccgtgtattactgtgcgaaatcctgggtctcctggtttgcttcctggggtcaaggaaccttggtcaccgtctcctcaggtggtggtggttctggcggcggcggctccggtggtggtggttctgatatcgtgatgacccagtctccagactccctggctgtgtctctgggcgagagggccaccatcaactgcaagtccagccagagtgttttaaacagctccaacaataggaactacttagcttggtaccagcagaaaccaggacagcctcctaagctgctcatttactgggcatctacccgggaatccggggtccctgaccgattcagtggcagcgggtctgggacagatttcactctcaccatcagtggcctgcaggctgaagatgtggcagtttattactgtcagcaacattatagtactccattcacttttggccctgggaccaaagtggatatcaaatccggaggtggtggatccgaggtgcagctggtcgagtctggaggaggattggtgcagcctggagggtcattgaaactctcatgtgcagcctctggattcaccttcaataagtacgccatgaactgggtccgccaggctccaggaaagggtttggaatgggttgctcgcataagaagtaaatataataattatgcaacatattatgccgattcagtgaaagacaggttcaccatctccagagatgattcaaaaaacactgcctatctacaaatgaacaacttgaaaactgaggacactgccgtgtactactgtgtgagacatgggaacttcggtaatagctacatatcctactgggcttactggggccaagggactctggtcaccgtctcctcaggtggtggtggttctggcggcggcggctccggtggtggtggttctcagactgttgtgactcaggaaccttcactcaccgtatcacctggtggaacagtcacactcacttgtggctcctcgactggggctgttacatctggcaactacccaaactgggtccaacaaaaaccaggtcaggcaccccgtggtctaataggtgggactaagttcctcgcccccggtactcctgccagattctcaggctccctgcttggaggcaaggctgccctcaccctctcaggggtacagccagaggatgaggcagaatattactgtgttctatggtacagcaaccgctgggtgttcggtggaggaaccaaactgactgtccta

SEQ ID NO: 195 - protein, 500 aa, synthetic construct
  REGION 1..500: note = MCSP-G4 VH-VL-P x F6A VH-VL-P
QVQLVQSGAEVKRPGASMKVSCKASGYTFTNYYIHWVRQAPGQGLEWMGWINPNSGATNYAQKFQGRVTMTRDTSTSTVYMELSSLRSEDTAVYYCAKSWVSWFASWGQGTLVTVSSGGGGSGGGGSGGGGSELVMTQSPDSLAVSLGERATINCKSSQSVLNSSNNRNYLAWYQQKPGQPPKLLIYWASTRESGVPDRFSGSGSGTDFTLTISGLQAEDVAVYYCQQHYSTPFTFGPGTKVDIKSGGGGSEVQLLESGGGLVQPGGSLKLSCAASGFTFNIYAMNWVRQAPGKGLEWVARIRSKYNNYATYYADSVKSRFTISRDDSKNTAYLQMNNLKTEDTAVYYCVRHGNFGNSYVSFFAYWGQGTLVTVSSGGGGSGGGGSGGGGSELVVTQEPSLTVSPGGTVTLTCGSSTGAVTSGYYPNWVQQKPGQAPRGLIGGTKFLAPGTPARFSGSLLGGKAALTLSGVQPEDEAEYYCALWYSNRWVFGGGTKLTVL

SEQ ID NO: 196 - DNA, 1500 bp, synthetic construct
  misc_feature 1..1500: note = MCSP-G4 VH-VL-P x F6A VH-VL-P
  source 1..1500: mol_type = other DNA
caggtgcagctggtccagtctggggctgaggtgaagaggcctggggcctcaatgaaggtctcctgcaaggcttctgggtacaccttcaccaactactatatacactgggtgcgacaggcccctggacaaggtcttgagtggatgggttggatcaaccctaacagtggtgccacaaactatgcacagaagttccagggcagagtcaccatgaccagggacacgtccacgagcacagtctacatggagctgagcagcctgagatctgaggacacggccgtgtattactgtgcgaaatcctgggtctcctggtttgcttcctggggtcaaggaaccttggtcaccgtctcctcaggtggtggtggttctggcggcggcggctccggtggtggtggttctgagctcgtgatgacccagtctccagactccctggctgtgtctctgggcgagagggccaccatcaactgcaagtccagccagagtgttttaaacagctccaacaataggaactacttagcttggtaccagcagaaaccaggacagcctcctaagctgctcatttactgggcatctacccgggaatccggggtccctgaccgattcagtggcagcgggtctgggacagatttcactctcaccatcagtggcctgcaggctgaagatgtggcagtttattactgtcagcaacattatagtactccattcacttttggccctgggaccaaagtggatatcaaatccggaggtggtggatccgaggtgcagctgctcgagtctggaggaggattggtgcagcctggagggtcattgaaactctcatgtgcagcctctggattcaccttcaatatctacgccatgaactgggtccgccaggctccaggaaagggtttggaatgggttgctcgcataagaagtaaatataataattatgcaacatattatgccgattcagtgaaaagcaggttcaccatctccagagatgattcaaaaaacactgcctatctacaaatgaacaacttgaaaactgaggacactgccgtgtactactgtgtgagacatgggaacttcggtaatagctacgtatccttcttcgcttactggggccaagggactctggtcaccgtctcctcaggtggtggtggttctggcggcggcggctccggtggtggtggttctgagctcgttgtgactcaggaaccttcactcaccgtatcacctggtggaacagtcacactcacttgtggctcctcgactggggctgttacatctggctactacccaaactgggtccaacaaaaaccaggtcaggcaccccgtggtctaataggtgggactaagttcctcgcccccggtactcctgccagattctcaggctccctgcttggaggcaaggctgccctcaccctctcaggggtacagccagaggatgaggcagaatattactgtgctctatggtacagcaaccgctgggtgttcggtggaggaaccaaactgactgtccta

SEQ ID NO: 197 - protein, 500 aa, synthetic construct
  REGION 1..500: note = MCSP-G4 VH-VL-P x H2C VH-VL-P
QVQLVQSGAEVKRPGASMKVSCKASGYTFTNYYIHWVRQAPGQGLEWMGWINPNSGATNYAQKFQGRVTMTRDTSTSTVYMELSSLRSEDTAVYYCAKSWVSWFASWGQGTLVTVSSGGGGSGGGGSGGGGSELVMTQSPDSLAVSLGERATINCKSSQSVLNSSNNRNYLAWYQQKPGQPPKLLIYWASTRESGVPDRFSGSGSGTDFTLTISGLQAEDVAVYYCQQHYSTPFTFGPGTKVDIKSGGGGSEVQLLESGGGLVQPGGSLKLSCAASGFTFNKYAMNWVRQAPGKGLEWVARIRSKYNNYATYYADSVKDRFTISRDDSKNTAYLQMNNLKTEDTAVYYCVRHGNFGNSYISYWAYWGQGTLVTVSSGGGGSGGGGSGGGGSELVVTQEPSLTVSPGGTVTLTCGSSTGAVTSGYYPNWVQQKPGQAPRGLIGGTKFLAPGTPARFSGSLLGGKAALTLSGVQPEDEAEYYCALWYSNRWVFGGGTKLTVL

SEQ ID NO: 198 - DNA, 1500 bp, synthetic construct
  misc_feature 1..1500: note = MCSP-G4 VH-VL-P x H2C VH-VL-P
  source 1..1500: mol_type = other DNA
caggtgcagctggtccagtctggggctgaggtgaagaggcctggggcctcaatgaaggtctcctgcaaggcttctgggtacaccttcaccaactactatatacactgggtgcgacaggcccctggacaaggtcttgagtggatgggttggatcaaccctaacagtggtgccacaaactatgcacagaagttccagggcagagtcaccatgaccagggacacgtccacgagcacagtctacatggagctgagcagcctgagatctgaggacacggccgtgtattactgtgcgaaatcctgggtctcctggtttgcttcctggggtcaaggaaccttggtcaccgtctcctcaggtggtggtggttctggcggcggcggctccggtggtggtggttctgagctcgtgatgacccagtctccagactccctggctgtgtctctgggcgagagggccaccatcaactgcaagtccagccagagtgttttaaacagctccaacaataggaactacttagcttggtaccagcagaaaccaggacagcctcctaagctgctcatttactgggcatctacccgggaatccggggtccctgaccgattcagtggcagcgggtctgggacagatttcactctcaccatcagtggcctgcaggctgaagatgtggcagtttattactgtcagcaacattatagtactccattcacttttggccctgggaccaaagtggatatcaaatccggaggtggtggatccgaggtgcagctgctcgagtctggaggaggattggtgcagcctggagggtcattgaaactctcatgtgcagcctctggattcaccttcaataagtacgccatgaactgggtccgccaggctccaggaaagggtttggaatgggttgctcgcataagaagtaaatataataattatgcaacatattatgccgattcagtgaaagacaggttcaccatctccagagatgattcaaaaaacactgcctatctacaaatgaacaacttgaaaactgaggacactgccgtgtactactgtgtgagacatgggaacttcggtaatagctacatatcctactgggcttactggggccaagggactctggtcaccgtctcctcaggtggtggtggttctggcggcggcggctccggtggtggtggttctgagctcgttgtgactcaggaaccttcactcaccgtatcacctggtggaacagtcacactcacttgtggctcctcgactggggctgttacatctggctactacccaaactgggtccaacaaaaaccaggtcaggcaccccgtggtctaataggtgggactaagttcctcgcccccggtactcctgccagattctcaggctccctgcttggaggcaaggctgccctcaccctctcaggggtacagccagaggatgaggcagaatattactgtgctctatggtacagcaaccgctgggtgttcggtggaggaaccaaactgactgtccta

SEQ ID NO: 199 - protein, 500 aa, synthetic construct
  REGION 1..500: note = MCSP-G4 VH-VL-P x H1E VH-VL-P
QVQLVQSGAEVKRPGASMKVSCKASGYTFTNYYIHWVRQAPGQGLEWMGWINPNSGATNYAQKFQGRVTMTRDTSTSTVYMELSSLRSEDTAVYYCAKSWVSWFASWGQGTLVTVSSGGGGSGGGGSGGGGSELVMTQSPDSLAVSLGERATINCKSSQSVLNSSNNRNYLAWYQQKPGQPPKLLIYWASTRESGVPDRFSGSGSGTDFTLTISGLQAEDVAVYYCQQHYSTPFTFGPGTKVDIKSGGGGSEVQLLESGGGLEQPGGSLKLSCAASGFTFNSYAMNWVRQAPGKGLEWVARIRSKYNNYATYYADSVKGRFTISRDDSKNTAYLQMNNLKTEDTAVYYCVRHGNFGNSYLSFWAYWGQGTLVTVSSGGGGSGGGGSGGGGSELVVTQEPSLTVSPGGTVTLTCGSSTGAVTSGYYPNWVQQKPGQAPRGLIGGTKFLAPGTPARFSGSLLGGKAALTLSGVQPEDEAEYYCALWYSNRWVFGGGTKLTVL

SEQ ID NO: 200 - DNA, 1500 bp, synthetic construct
  misc_feature 1..1500: note = MCSP-G4 VH-VL-P x H1E VH-VL-P
  source 1..1500: mol_type = other DNA
caggtgcagctggtccagtctggggctgaggtgaagaggcctggggcctcaatgaaggtctcctgcaaggcttctgggtacaccttcaccaactactatatacactgggtgcgacaggcccctggacaaggtcttgagtggatgggttggatcaaccctaacagtggtgccacaaactatgcacagaagttccagggcagagtcaccatgaccagggacacgtccacgagcacagtctacatggagctgagcagcctgagatctgaggacacggccgtgtattactgtgcgaaatcctgggtctcctggtttgcttcctggggtcaaggaaccttggtcaccgtctcctcaggtggtggtggttctggcggcggcggctccggtggtggtggttctgagctcgtgatgacccagtctccagactccctggctgtgtctctgggcgagagggccaccatcaactgcaagtccagccagagtgttttaaacagctccaacaataggaactacttagcttggtaccagcagaaaccaggacagcctcctaagctgctcatttactgggcatctacccgggaatccggggtccctgaccgattcagtggcagcgggtctgggacagatttcactctcaccatcagtggcctgcaggctgaagatgtggcagtttattactgtcagcaacattatagtactccattcacttttggccctgggaccaaagtggatatcaaatccggaggtggtggatccgaggtgcagctgctcgagtctggaggaggattggagcagcctggagggtcattgaaactctcatgtgcagcctctggattcaccttcaattcgtacgccatgaactgggtccgccaggctccaggaaagggtttggaatgggttgctcgcataagaagtaaatataataattatgcaacatattatgccgattcagtgaaagggaggttcaccatctccagagatgattcaaaaaacactgcctatctacaaatgaacaacttgaaaactgaggacactgccgtgtactactgtgtgagacatgggaacttcggtaatagctacctatccttctgggcttactggggccaagggactctggtcaccgtctcctcaggtggtggtggttctggcggcggcggctccggtggtggtggttctgagctcgttgtgactcaggaaccttcactcaccgtatcacctggtggaacagtcacactcacttgtggctcctcgactggggctgttacatctggctactacccaaactgggtccaacaaaaaccaggtcaggcaccccgtggtctaataggtgggactaagttcctcgcccccggtactcctgccagattctcaggctccctgcttggaggcaaggctgccctcaccctctcaggggtacagccagaggatgaggcagaatattactgtgctctatggtacagcaaccgctgggtgttcggtggaggaaccaaactgactgtccta

SEQ ID NO: 201 - protein, 500 aa, synthetic construct
  REGION 1..500: note = MCSP-G4 VH-VL-P x G4H VH-VL-P
QVQLVQSGAEVKRPGASMKVSCKASGYTFTNYYIHWVRQAPGQGLEWMGWINPNSGATNYAQKFQGRVTMTRDTSTSTVYMELSSLRSEDTAVYYCAKSWVSWFASWGQGTLVTVSSGGGGSGGGGSGGGGSELVMTQSPDSLAVSLGERATINCKSSQSVLNSSNNRNYLAWYQQKPGQPPKLLIYWASTRESGVPDRFSGSGSGTDFTLTISGLQAEDVAVYYCQQHYSTPFTFGPGTKVDIKSGGGGSEVQLLESGGGLVQPGGSLKLSCAASGFTFNRYAMNWVRQAPGKGLEWVARIRSKYNNYATYYADSVKGRFTISRDDSKNTAYLQMNNLKTEDTAVYYCVRHGNFGNSYLSYFAYWGQGTLVTVSSGGGGSGGGGSGGGGSELVVTQEPSLTVSPGGTVTLTCGSSTGAVTSGYYPNWVQQKPGQAPRGLIGGTKFLAPGTPARFSGSLLGGKAALTLSGVQPEDEAEYYCALWYSNRWVFGGGTKLTVL

SEQ ID NO: 202 - DNA, 1500 bp, synthetic construct
  misc_feature 1..1500: note = MCSP-G4 VH-VL-P x G4H VH-VL-P
  source 1..1500: mol_type = other DNA
caggtgcagctggtccagtctggggctgaggtgaagaggcctggggcctcaatgaaggtctcctgcaaggcttctgggtacaccttcaccaactactatatacactgggtgcgacaggcccctggacaaggtcttgagtggatgggttggatcaaccctaacagtggtgccacaaactatgcacagaagttccagggcagagtcaccatgaccagggacacgtccacgagcacagtctacatggagctgagcagcctgagatctgaggacacggccgtgtattactgtgcgaaatcctgggtctcctggtttgcttcctggggtcaaggaaccttggtcaccgtctcctcaggtggtggtggttctggcggcggcggctccggtggtggtggttctgagctcgtgatgacccagtctccagactccctggctgtgtctctgggcgagagggccaccatcaactgcaagtccagccagagtgttttaaacagctccaacaataggaactacttagcttggtaccagcagaaaccaggacagcctcctaagctgctcatttactgggcatctacccgggaatccggggtccctgaccgattcagtggcagcgggtctgggacagatttcactctcaccatcagtggcctgcaggctgaagatgtggcagtttattactgtcagcaacattatagtactccattcacttttggccctgggaccaaagtggatatcaaatccggaggtggtggatccgaggtgcagctgctcgagtctggaggaggattggtgcagcctggagggtcattgaaactctcatgtgcagcctctggattcaccttcaatcgctacgccatgaactgggtccgccaggctccaggaaagggtttggaatgggttgctcgcataagaagtaaatataataattatgcaacatattatgccgattcagtgaaagggaggttcaccatctccagagatgattcaaaaaacactgcctatctacaaatgaacaacttgaaaactgaggacactgccgtgtactactgtgtgagacatgggaacttcggtaatagctacttatcctacttcgcttactggggccaagggactctggtcaccgtctcctcaggtggtggtggttctggcggcggcggctccggtggtggtggttctgagctcgttgtgactcaggaaccttcactcaccgtatcacctggtggaacagtcacactcacttgtggctcctcgactggggctgttacatctggctactacccaaactgggtccaacaaaaaccaggtcaggcaccccgtggtctaataggtgggactaagttcctcgcccccggtactcctgccagattctcaggctccctgcttggaggcaaggctgccctcaccctctcaggggtacagccagaggatgaggcagaatattactgtgctctatggtacagcaaccgctgggtgttcggtggaggaaccaaactgactgtccta

SEQ ID NO: 203 - protein, 500 aa, synthetic construct
  REGION 1..500: note = MCSP-G4 VH-VL-P x A2J VH-VL-P
QVQLVQSGAEVKRPGASMKVSCKASGYTFTNYYIHWVRQAPGQGLEWMGWINPNSGATNYAQKFQGRVTMTRDTSTSTVYMELSSLRSEDTAVYYCAKSWVSWFASWGQGTLVTVSSGGGGSGGGGSGGGGSELVMTQSPDSLAVSLGERATINCKSSQSVLNSSNNRNYLAWYQQKPGQPPKLLIYWASTRESGVPDRFSGSGSGTDFTLTISGLQAEDVAVYYCQQHYSTPFTFGPGTKVDIKSGGGGSEVQLLESGGGLVQPGGSLKLSCAASGFTFNVYAMNWVRQAPGKGLEWVARIRSKYNNYATYYADSVKKRFTISRDDSKNTAYLQMNNLKTEDTAVYYCVRHGNFGNSYLSWWAYWGQGTLVTVSSGGGGSGGGGSGGGGSELVVTQEPSLTVSPGGTVTLTCRSSTGAVTSGYYPNWVQQKPGQAPRGLIGATDMRPSGTPARFSGSLLGGKAALTLSGVQPEDEAEYYCALWYSNRWVFGGGTKLTVL

SEQ ID NO: 204 - DNA, 1500 bp, synthetic construct
  misc_feature 1..1500: note = MCSP-G4 VH-VL-P x A2J VH-VL-P
  source 1..1500: mol_type = other DNA
caggtgcagctggtccagtctggggctgaggtgaagaggcctggggcctcaatgaaggtctcctgcaaggcttctgggtacaccttcaccaactactatatacactgggtgcgacaggcccctggacaaggtcttgagtggatgggttggatcaaccctaacagtggtgccacaaactatgcacagaagttccagggcagagtcaccatgaccagggacacgtccacgagcacagtctacatggagctgagcagcctgagatctgaggacacggccgtgtattactgtgcgaaatcctgggtctcctggtttgcttcctggggtcaaggaaccttggtcaccgtctcctcaggtggtggtggttctggcggcggcggctccggtggtggtggttctgagctcgtgatgacccagtctccagactccctggctgtgtctctgggcgagagggccaccatcaactgcaagtccagccagagtgttttaaacagctccaacaataggaactacttagcttggtaccagcagaaaccaggacagcctcctaagctgctcatttactgggcatctacccgggaatccggggtccctgaccgattcagtggcagcgggtctgggacagatttcactctcaccatcagtggcctgcaggctgaagatgtggcagtttattactgtcagcaacattatagtactccattcacttttggccctgggaccaaagtggatatcaaatccggaggtggtggatccgaggtgcagctgctcgagtctggaggaggattggtgcagcctggagggtcattgaaactctcatgtgcagcctctggattcaccttcaatgtctacgccatgaactgggtccgccaggctccaggaaagggtttggaatgggttgctcgcataagaagtaaatataataattatgcaacatattatgccgattcagtgaaaaagaggttcaccatctccagagatgattcaaaaaacactgcctatctacaaatgaacaacttgaaaactgaggacactgccgtgtactactgtgtgagacatgggaacttcggtaatagctacttatcctggtgggcttactggggccaagggactctggtcaccgtctcctcaggtggtggtggttctggcggcggcggctccggtggtggtggttctgagctcgttgtgactcaggaaccttcactcaccgtatcacctggtggaacagtcacactcacttgtcgctcctcgactggggctgttacatctggctactacccaaactgggtccaacaaaaaccaggtcaggcaccccgtggtctaataggtgccactgacatgaggccctctggtactcctgccagattctcaggctccctgcttggaggcaaggctgccctcaccctctcaggggtacagccagaggatgaggcagaatattactgtgctctatggtacagcaaccgctgggtgttcggtggaggaaccaaactgactgtccta

SEQ ID NO: 205 - protein, 500 aa, synthetic construct
  REGION 1..500: note = MCSP-G4 VH-VL-P x E1L VH-VL-P
QVQLVQSGAEVKRPGASMKVSCKASGYTFTNYYIHWVRQAPGQGLEWMGWINPNSGATNYAQKFQGRVTMTRDTSTSTVYMELSSLRSEDTAVYYCAKSWVSWFASWGQGTLVTVSSGGGGSGGGGSGGGGSELVMTQSPDSLAVSLGERATINCKSSQSVLNSSNNRNYLAWYQQKPGQPPKLLIYWASTRESGVPDRFSGSGSGTDFTLTISGLQAEDVAVYYCQQHYSTPFTFGPGTKVDIKSGGGGSEVQLLESGGGLVQPGGSLKLSCAASGFTFNKYAMNWVRQAPGKGLEWVARIRSKYNNYATYYADSVKSRFTISRDDSKNTAYLQMNNLKTEDTAVYYCVRHGNFGNSYTSYYAYWGQGTLVTVSSGGGGSGGGGSGGGGSELVVTQEPSLTVSPGGTVTLTCGSSTGAVTSGYYPNWVQQKPGQAPRGLIGGTKFLAPGTPARFSGSLLGGKAALTLSGVQPEDEAEYYCALWYSNRWVFGGGTKLTVL

SEQ ID NO: 206 - DNA, 1500 bp, synthetic construct
  misc_feature 1..1500: note = MCSP-G4 VH-VL-P x E1L VH-VL-P
  source 1..1500: mol_type = other DNA
caggtgcagctggtccagtctggggctgaggtgaagaggcctggggcctcaatgaaggtctcctgcaaggcttctgggtacaccttcaccaactactatatacactgggtgcgacaggcccctggacaaggtcttgagtggatgggttggatcaaccctaacagtggtgccacaaactatgcacagaagttccagggcagagtcaccatgaccagggacacgtccacgagcacagtctacatggagctgagcagcctgagatctgaggacacggccgtgtattactgtgcgaaatcctgggtctcctggtttgcttcctggggtcaaggaaccttggtcaccgtctcctcaggtggtggtggttctggcggcggcggctccggtggtggtggttctgagctcgtgatgacccagtctccagactccctggctgtgtctctgggcgagagggccaccatcaactgcaagtccagccagagtgttttaaacagctccaacaataggaactacttagcttggtaccagcagaaaccaggacagcctcctaagctgctcatttactgggcatctacccgggaatccggggtccctgaccgattcagtggcagcgggtctgggacagatttcactctcaccatcagtggcctgcaggctgaagatgtggcagtttattactgtcagcaacattatagtactccattcacttttggccctgggaccaaagtggatatcaaatccggaggtggtggatccgaggtgcagctgctcgagtctggaggaggattggtgcagcctggagggtcattgaaactctcatgtgcagcctctggattcaccttcaataagtacgccatgaactgggtccgccaggctccaggaaagggtttggaatgggttgctcgcataagaagtaaatataataattatgcaacatattatgccgattcagtgaaatcgaggttcaccatctccagagatgattcaaaaaacactgcctatctacaaatgaacaacttgaaaactgaggacactgccgtgtactactgtgtgagacatgggaacttcggtaatagctacacatcctactacgcttactggggccaagggactctggtcaccgtctcctcaggtggtggtggttctggcggcggcggctccggtggtggtggttctgagctcgttgtgactcaggaaccttcactcaccgtatcacctggtggaacagtcacactcacttgtggctcctcgactggggctgttacatctggctactacccaaactgggtccaacaaaaaccaggtcaggcaccccgtggtctaataggtgggactaagttcctcgcccccggtactcctgccagattctcaggctccctgcttggaggcaaggctgccctcaccctctcaggggtacagccagaggatgaggcagaatattactgtgctctatggtacagcaaccgctgggtgttcggtggaggaaccaaactgactgtccta

SEQ ID NO: 207 - protein, 500 aa, synthetic construct
  REGION 1..500: note = MCSP-G4 VH-VL-P x E2M VH-VL-P
QVQLVQSGAEVKRPGASMKVSCKASGYTFTNYYIHWVRQAPGQGLEWMGWINPNSGATNYAQKFQGRVTMTRDTSTSTVYMELSSLRSEDTAVYYCAKSWVSWFASWGQGTLVTVSSGGGGSGGGGSGGGGSELVMTQSPDSLAVSLGERATINCKSSQSVLNSSNNRNYLAWYQQKPGQPPKLLIYWASTRESGVPDRFSGSGSGTDFTLTISGLQAEDVAVYYCQQHYSTPFTFGPGTKVDIKSGGGGSEVQLLESGGGLVQPGGSLKLSCAASGFTFNGYAMNWVRQAPGKGLEWVARIRSKYNNYATYYADSVKERFTISRDDSKNTAYLQMNNLKTEDTAVYYCVRHRNFGNSYLSWFAYWGQGTLVTVSSGGGGSGGGGSGGGGSELVVTQEPSLTVSPGGTVTLTCRSSTGAVTSGYYPNWVQQKPGQAPRGLIGATDMRPSGTPARFSGSLLGGKAALTLSGVQPEDEAEYYCALWYSNRWVFGGGTKLTVL

SEQ ID NO: 208 - DNA, 1500 bp, synthetic construct
  misc_feature 1..1500: note = MCSP-G4 VH-VL-P x E2M VH-VL-P
  source 1..1500: mol_type = other DNA
caggtgcagctggtccagtctggggctgaggtgaagaggcctggggcctcaatgaaggtctcctgcaaggcttctgggtacaccttcaccaactactatatacactgggtgcgacaggcccctggacaaggtcttgagtggatgggttggatcaaccctaacagtggtgccacaaactatgcacagaagttccagggcagagtcaccatgaccagggacacgtccacgagcacagtctacatggagctgagcagcctgagatctgaggacacggccgtgtattactgtgcgaaatcctgggtctcctggtttgcttcctggggtcaaggaaccttggtcaccgtctcctcaggtggtggtggttctggcggcggcggctccggtggtggtggttctgagctcgtgatgacccagtctccagactccctggctgtgtctctgggcgagagggccaccatcaactgcaagtccagccagagtgttttaaacagctccaacaataggaactacttagcttggtaccagcagaaaccaggacagcctcctaagctgctcatttactgggcatctacccgggaatccggggtccctgaccgattcagtggcagcgggtctgggacagatttcactctcaccatcagtggcctgcaggctgaagatgtggcagtttattactgtcagcaacattatagtactccattcacttttggccctgggaccaaagtggatatcaaatccggaggtggtggatccgaggtgcagctgctcgagtctggaggaggattggtgcagcctggagggtcattgaaactctcatgtgcagcctctggattcaccttcaatggctacgccatgaactgggtccgccaggctccaggaaagggtttggaatgggttgctcgcataagaagtaaatataataattatgcaacatattatgccgattcagtgaaagagaggttcaccatctccagagatgattcaaaaaacactgcctatctacaaatgaacaacttgaaaactgaggacactgccgtgtactactgtgtgagacataggaacttcggtaatagctacttatcctggttcgcttactggggccaagggactctggtcaccgtctcctcaggtggtggtggttctggcggcggcggctccggtggtggtggttctgagctcgttgtgactcaggaaccttcactcaccgtatcacctggtggaacagtcacactcacttgtcgctcctcgactggggctgttacatctggctactacccaaactgggtccaacaaaaaccaggtcaggcaccccgtggtctaataggtgccactgacatgaggccctctggtactcctgccagattctcaggctccctgcttggaggcaaggctgccctcaccctctcaggggtacagccagaggatgaggcagaatattactgtgctctatggtacagcaaccgctgggtgttcggtggaggaaccaaactgactgtccta

SEQ ID NO: 209 - protein, 500 aa, synthetic construct
  REGION 1..500: note = MCSP-G4 VH-VL-P x F7O VH-VL-P
QVQLVQSGAEVKRPGASMKVSCKASGYTFTNYYIHWVRQAPGQGLEWMGWINPNSGATNYAQKFQGRVTMTRDTSTSTVYMELSSLRSEDTAVYYCAKSWVSWFASWGQGTLVTVSSGGGGSGGGGSGGGGSELVMTQSPDSLAVSLGERATINCKSSQSVLNSSNNRNYLAWYQQKPGQPPKLLIYWASTRESGVPDRFSGSGSGTDFTLTISGLQAEDVAVYYCQQHYSTPFTFGPGTKVDIKSGGGGSEVQLLESGGGLVQPGGSLKLSCAASGFTFNVYAMNWVRQAPGKGLEWVARIRSKYNNYATYYADSVKKRFTISRDDSKNTAYLQMNNLKTEDTAVYYCVRHGNFGNSYISWWAYWGQGTLVTVSSGGGGSGGGGSGGGGSELVVTQEPSLTVSPGGTVTLTCGSSTGAVTSGYYPNWVQQKPGQAPRGLIGGTKFLAPGTPARFSGSLLGGKAALTLSGVQPEDEAEYYCALWYSNRWVFGGGTKLTVL

SEQ ID NO: 210 - DNA, 1500 bp, synthetic construct
  misc_feature 1..1500: note = MCSP-G4 VH-VL-P x F7O VH-VL-P
  source 1..1500: mol_type = other DNA
caggtgcagctggtccagtctggggctgaggtgaagaggcctggggcctcaatgaaggtctcctgcaaggcttctgggtacaccttcaccaactactatatacactgggtgcgacaggcccctggacaaggtcttgagtggatgggttggatcaaccctaacagtggtgccacaaactatgcacagaagttccagggcagagtcaccatgaccagggacacgtccacgagcacagtctacatggagctgagcagcctgagatctgaggacacggccgtgtattactgtgcgaaatcctgggtctcctggtttgcttcctggggtcaaggaaccttggtcaccgtctcctcaggtggtggtggttctggcggcggcggctccggtggtggtggttctgagctcgtgatgacccagtctccagactccctggctgtgtctctgggcgagagggccaccatcaactgcaagtccagccagagtgttttaaacagctccaacaataggaactacttagcttggtaccagcagaaaccaggacagcctcctaagctgctcatttactgggcatctacccgggaatccggggtccctgaccgattcagtggcagcgggtctgggacagatttcactctcaccatcagtggcctgcaggctgaagatgtggcagtttattactgtcagcaacattatagtactccattcacttttggccctgggaccaaagtggatatcaaatccggaggtggtggatccgaggtgcagctgctcgagtctggaggaggattggtgcagcctggagggtcattgaaactctcatgtgcagcctctggattcaccttcaatgtgtacgccatgaactgggtccgccaggctccaggaaagggtttggaatgggttgctcgcataagaagtaaatataataattatgcaacatattatgccgattcagtgaaaaagaggttcaccatctccagagatgattcaaaaaacactgcctatctacaaatgaacaacttgaaaactgaggacactgccgtgtactactgtgtgagacatgggaacttcggtaatagctacatatcctggtgggcttactggggccaagggactctggtcaccgtctcctcaggtggtggtggttctggcggcggcggctccggtggtggtggttctgagctcgttgtgactcaggaaccttcactcaccgtatcacctggtggaacagtcacactcacttgtggctcctcgactggggctgttacatctggctactacccaaactgggtccaacaaaaaccaggtcaggcaccccgtggtctaataggtgggactaagttcctcgcccccggtactcctgccagattctcaggctccctgcttggaggcaaggctgccctcaccctctcaggggtacagccagaggatgaggcagaatattactgtgctctatggtacagcaaccgctgggtgttcggtggaggaaccaaactgactgtccta

SEQ ID NO: 211 - protein, 500 aa, synthetic construct
  REGION 1..500: note = MCSP-G4 VH-VL-P x F12Q VH-VL
QVQLVQSGAEVKRPGASMKVSCKASGYTFTNYYIHWVRQAPGQGLEWMGWINPNSGATNYAQKFQGRVTMTRDTSTSTVYMELSSLRSEDTAVYYCAKSWVSWFASWGQGTLVTVSSGGGGSGGGGSGGGGSELVMTQSPDSLAVSLGERATINCKSSQSVLNSSNNRNYLAWYQQKPGQPPKLLIYWASTRESGVPDRFSGSGSGTDFTLTISGLQAEDVAVYYCQQHYSTPFTFGPGTKVDIKSGGGGSEVQLVESGGGLVQPGGSLKLSCAASGFTFNSYAMNWVRQAPGKGLEWVARIRSKYNNYATYYADSVKGRFTISRDDSKNTAYLQMNNLKTEDTAVYYCVRHGNFGNSYVSWWAYWGQGTLVTVSSGGGGSGGGGSGGGGSQTVVTQEPSLTVSPGGTVTLTCGSSTGAVTSGNYPNWVQQKPGQAPRGLIGGTKFLAPGTPARFSGSLLGGKAALTLSGVQPEDEAEYYCVLWYSNRWVFGGGTKLTVL

SEQ ID NO: 212 - DNA, 1500 bp, synthetic construct
  misc_feature 1..1500: note = MCSP-G4 VH-VL-P x F12Q VH-VL
  source 1..1500: mol_type = other DNA
caggtgcagctggtccagtctggggctgaggtgaagaggcctggggcctcaatgaaggtctcctgcaaggcttctgggtacaccttcaccaactactatatacactgggtgcgacaggcccctggacaaggtcttgagtggatgggttggatcaaccctaacagtggtgccacaaactatgcacagaagttccagggcagagtcaccatgaccagggacacgtccacgagcacagtctacatggagctgagcagcctgagatctgaggacacggccgtgtattactgtgcgaaatcctgggtctcctggtttgcttcctggggtcaaggaaccttggtcaccgtctcctcaggtggtggtggttctggcggcggcggctccggtggtggtggttctgagctcgtgatgacccagtctccagactccctggctgtgtctctgggcgagagggccaccatcaactgcaagtccagccagagtgttttaaacagctccaacaataggaactacttagcttggtaccagcagaaaccaggacagcctcctaagctgctcatttactgggcatctacccgggaatccggggtccctgaccgattcagtggcagcgggtctgggacagatttcactctcaccatcagtggcctgcaggctgaagatgtggcagtttattactgtcagcaacattatagtactccattcacttttggccctgggaccaaagtggatatcaaatccggaggtggtggatccgaggtgcagctggtcgagtctggaggaggattggtgcagcctggagggtcattgaaactctcatgtgcagcctctggattcaccttcaatagctacgccatgaactgggtccgccaggctccaggaaagggtttggaatgggttgctcgcataagaagtaaatataataattatgcaacatattatgccgattcagtgaaaggcaggttcaccatctccagagatgattcaaaaaacactgcctatctacaaatgaacaacttgaaaactgaggacactgccgtgtactactgtgtgagacatgggaacttcggtaatagctacgtttcctggtgggcttactggggccaagggactctggtcaccgtctcctcaggtggtggtggttctggcggcggcggctccggtggtggtggttctcagactgttgtgactcaggaaccttcactcaccgtatcacctggtggaacagtcacactcacttgtggctcctcgactggggctgttacatctggcaactacccaaactgggtccaacaaaaaccaggtcaggcaccccgtggtctaataggtgggactaagttcctcgcccccggtactcctgccagattctcaggctccctgcttggaggcaaggctgccctcaccctctcaggggtacagccagaggatgaggcagaatattactgtgttctatggtacagcaaccgctgggtgttcggtggaggaaccaaactgactgtccta

SEQ ID NO: 213 - protein, 500 aa, synthetic construct
  REGION 1..500: note = MCSP-G4 VH-VL-P x I2C VH-VL
QVQLVQSGAEVKRPGASMKVSCKASGYTFTNYYIHWVRQAPGQGLEWMGWINPNSGATNYAQKFQGRVTMTRDTSTSTVYMELSSLRSEDTAVYYCAKSWVSWFASWGQGTLVTVSSGGGGSGGGGSGGGGSELVMTQSPDSLAVSLGERATINCKSSQSVLNSSNNRNYLAWYQQKPGQPPKLLIYWASTRESGVPDRFSGSGSGTDFTLTISGLQAEDVAVYYCQQHYSTPFTFGPGTKVDIKSGGGGSEVQLVESGGGLVQPGGSLKLSCAASGFTFNKYAMNWVRQAPGKGLEWVARIRSKYNNYATYYADSVKDRFTISRDDSKNTAYLQMNNLKTEDTAVYYCVRHGNFGNSYISYWAYWGQGTLVTVSSGGGGSGGGGSGGGGSQTVVTQEPSLTVSPGGTVTLTCGSSTGAVTSGNYPNWVQQKPGQAPRGLIGGTKFLAPGTPARFSGSLLGGKAALTLSGVQPEDEAEYYCVLWYSNRWVFGGGTKLTVL

SEQ ID NO: 214 - DNA, 1500 bp, synthetic construct
  misc_feature 1..1500: note = MCSP-G4 VH-VL-P x I2C VH-VL
  source 1..1500: mol_type = other DNA
caggtgcagctggtccagtctggggctgaggtgaagaggcctggggcctcaatgaaggtctcctgcaaggcttctgggtacaccttcaccaactactatatacactgggtgcgacaggcccctggacaaggtcttgagtggatgggttggatcaaccctaacagtggtgccacaaactatgcacagaagttccagggcagagtcaccatgaccagggacacgtccacgagcacagtctacatggagctgagcagcctgagatctgaggacacggccgtgtattactgtgcgaaatcctgggtctcctggtttgcttcctggggtcaaggaaccttggtcaccgtctcctcaggtggtggtggttctggcggcggcggctccggtggtggtggttctgagctcgtgatgacccagtctccagactccctggctgtgtctctgggcgagagggccaccatcaactgcaagtccagccagagtgttttaaacagctccaacaataggaactacttagcttggtaccagcagaaaccaggacagcctcctaagctgctcatttactgggcatctacccgggaatccggggtccctgaccgattcagtggcagcgggtctgggacagatttcactctcaccatcagtggcctgcaggctgaagatgtggcagtttattactgtcagcaacattatagtactccattcacttttggccctgggaccaaagtggatatcaaatccggaggtggtggatccgaggtgcagctggtcgagtctggaggaggattggtgcagcctggagggtcattgaaactctcatgtgcagcctctggattcaccttcaataagtacgccatgaactgggtccgccaggctccaggaaagggtttggaatgggttgctcgcataagaagtaaatataataattatgcaacatattatgccgattcagtgaaagacaggttcaccatctccagagatgattcaaaaaacactgcctatctacaaatgaacaacttgaaaactgaggacactgccgtgtactactgtgtgagacatgggaacttcggtaatagctacatatcctactgggcttactggggccaagggactctggtcaccgtctcctcaggtggtggtggttctggcggcggcggctccggtggtggtggttctcagactgttgtgactcaggaaccttcactcaccgtatcacctggtggaacagtcacactcacttgtggctcctcgactggggctgttacatctggcaactacccaaactgggtccaacaaaaaccaggtcaggcaccccgtggtctaataggtgggactaagttcctcgcccccggtactcctgccagattctcaggctccctgcttggaggcaaggctgccctcaccctctcaggggtacagccagaggatgaggcagaatattactgtgttctatggtacagcaaccgctgggtgttcggtggaggaaccaaactgactgtccta

SEQ ID NO: 215 - protein, 500 aa, synthetic construct
  REGION 1..500: note = MCSP-D2 VH-VL x H2C VH-VL
QVQLVQSGAEVKKPGASVKVSCKASGYTFTGYYMHWVRQAPGQGLEWMGWINPNSGGTSYAQKFQGRVTMTRDTSTSTVYMELSNLRSDDTAVYYCAKSWVSWFASWGQGTLVTVSSGGGGSGGGGSGGGGSDIVMTQSPDSLAVSLGERATINCKSSQSVLNSSNNRNYLAWYQQKPGQPPKLLIYWASTRESGVPDRFSGSGSGTDFTLTISGLQAEDVAVYYCQQHYSTPFTFGPGTKVDIKSGGGGSEVQLVESGGGLVQPGGSLKLSCAASGFTFNKYAMNWVRQAPGKGLEWVARIRSKYNNYATYYADSVKDRFTISRDDSKNTAYLQMNNLKTEDTAVYYCVRHGNFGNSYISYWAYWGQGTLVTVSSGGGGSGGGGSGGGGSQTVVTQEPSLTVSPGGTVTLTCGSSTGAVTSGYYPNWVQQKPGQAPRGLIGGTKFLAPGTPARFSGSLLGGKAALTLSGVQPEDEAEYYCALWYSNRWVFGGGTKLTVL

SEQ ID NO: 216 - DNA, 1500 bp, synthetic construct
  misc_feature 1..1500: note = MCSP-D2 VH-VL x H2C VH-VL
  source 1..1500: mol_type = other DNA
caggtgcagctggtccagtctggggctgaggtgaagaagcctggggcctcagtgaaggtctcctgcaaggcttctggatacaccttcaccggctactatatgcactgggtgcgacaggcccctggacaagggcttgagtggatgggatggatcaaccctaacagtggtggcacaagctacgcacagaagttccagggcagagtcaccatgactagggacacgtccacgagcacagtctacatggagctgagcaacctgagatctgacgacacggccgtgtattactgtgcgaaatcctgggtctcctggtttgcttcctggggtcaaggaaccttggtcaccgtctcctcaggtggtggtggttctggcggcggcggctccggtggtggtggttctgatatcgtgatgacccagtctccagactccctggctgtgtctctgggcgagagggccaccatcaactgcaagtccagccagagtgttttaaacagctccaacaataggaactacttagcttggtaccagcagaaaccaggacagcctcctaagctgctcatttactgggcatctacccgggaatccggggtccctgaccgattcagtggcagcgggtctgggacagatttcactctcaccatcagtggcctgcaggctgaagatgtggcagtttattactgtcagcaacattatagtactccattcacttttggccctgggaccaaagtggatatcaaatccggaggtggtggatccgaggtgcagctggtcgagtctggaggaggattggtgcagcctggagggtcattgaaactctcatgtgcagcctctggattcaccttcaataagtacgccatgaactgggtccgccaggctccaggaaagggtttggaatgggttgctcgcataagaagtaaatataataattatgcaacatattatgccgattcagtgaaagacaggttcaccatctccagagatgattcaaaaaacactgcctatctacaaatgaacaacttgaaaactgaggacactgccgtgtactactgtgtgagacatgggaacttcggtaatagctacatatcctactgggcttactggggccaagggactctggtcaccgtctcctcaggtggtggtggttctggcggcggcggctccggtggtggtggttctcagactgttgtgactcaggaaccttcactcaccgtatcacctggtggaacagtcacactcacttgtggctcctcgactggggctgttacatctggctactacccaaactgggtccaacaaaaaccaggtcaggcaccccgtggtctaataggtgggactaagttcctcgcccccggtactcctgccagattctcaggctccctgcttggaggcaaggctgccctcaccctctcaggggtacagccagaggatgaggcagaatattactgtgctctatggtacagcaaccgctgggtgttcggtggaggaaccaaactgactgtccta

SEQ ID NO: 217 - protein, 500 aa, synthetic construct
  REGION 1..500: note = MCSP-D2 VH-VL x F12Q VH-VL
QVQLVQSGAEVKKPGASVKVSCKASGYTFTGYYMHWVRQAPGQGLEWMGWINPNSGGTSYAQKFQGRVTMTRDTSTSTVYMELSNLRSDDTAVYYCAKSWVSWFASWGQGTLVTVSSGGGGSGGGGSGGGGSDIVMTQSPDSLAVSLGERATINCKSSQSVLNSSNNRNYLAWYQQKPGQPPKLLIYWASTRESGVPDRFSGSGSGTDFTLTISGLQAEDVAVYYCQQHYSTPFTFGPGTKVDIKSGGGGSEVQLVESGGGLVQPGGSLKLSCAASGFTFNSYAMNWVRQAPGKGLEWVARIRSKYNNYATYYADSVKGRFTISRDDSKNTAYLQMNNLKTEDTAVYYCVRHGNFGNSYVSWWAYWGQGTLVTVSSGGGGSGGGGSGGGGSQTVVTQEPSLTVSPGGTVTLTCGSSTGAVTSGNYPNWVQQKPGQAPRGLIGGTKFLAPGTPARFSGSLLGGKAALTLSGVQPEDEAEYYCVLWYSNRWVFGGGTKLTVL

SEQ ID NO: 218 - DNA, 1500 bp, synthetic construct
  misc_feature 1..1500: note = MCSP-D2 VH-VL x F12Q VH-VL
  source 1..1500: mol_type = other DNA
caggtgcagctggtccagtctggggctgaggtgaagaagcctggggcctcagtgaaggtctcctgcaaggcttctggatacaccttcaccggctactatatgcactgggtgcgacaggcccctggacaagggcttgagtggatgggatggatcaaccctaacagtggtggcacaagctacgcacagaagttccagggcagagtcaccatgactagggacacgtccacgagcacagtctacatggagctgagcaacctgagatctgacgacacggccgtgtattactgtgcgaaatcctgggtctcctggtttgcttcctggggtcaaggaaccttggtcaccgtctcctcaggtggtggtggttctggcggcggcggctccggtggtggtggttctgatatcgtgatgacccagtctccagactccctggctgtgtctctgggcgagagggccaccatcaactgcaagtccagccagagtgttttaaacagctccaacaataggaactacttagcttggtaccagcagaaaccaggacagcctcctaagctgctcatttactgggcatctacccgggaatccggggtccctgaccgattcagtggcagcgggtctgggacagatttcactctcaccatcagtggcctgcaggctgaagatgtggcagtttattactgtcagcaacattatagtactccattcacttttggccctgggaccaaagtggatatcaaatccggaggtggtggatccgaggtgcagctggtcgagtctggaggaggattggtgcagcctggagggtcattgaaactctcatgtgcagcctctggattcaccttcaatagctacgccatgaactgggtccgccaggctccaggaaagggtttggaatgggttgctcgcataagaagtaaatataataattatgcaacatattatgccgattcagtgaaaggcaggttcaccatctccagagatgattcaaaaaacactgcctatctacaaatgaacaacttgaaaactgaggacactgccgtgtactactgtgtgagacatgggaacttcggtaatagctacgtttcctggtgggcttactggggccaagggactctggtcaccgtctcctcaggtggtggtggttctggcggcggcggctccggtggtggtggttctcagactgttgtgactcaggaaccttcactcaccgtatcacctggtggaacagtcacactcacttgtggctcctcgactggggctgttacatctggcaactacccaaactgggtccaacaaaaaccaggtcaggcaccccgtggtctaataggtgggactaagttcctcgcccccggtactcctgccagattctcaggctccctgcttggaggcaaggctgccctcaccctctcaggggtacagccagaggatgaggcagaatattactgtgttctatggtacagcaaccgctgggtgttcggtggaggaaccaaactgactgtccta

SEQ ID NO: 219 - protein, 500 aa, synthetic construct
  REGION 1..500: note = MCSP-D2 VH-VL x I2C VH-VL
QVQLVQSGAEVKKPGASVKVSCKASGYTFTGYYMHWVRQAPGQGLEWMGWINPNSGGTSYAQKFQGRVTMTRDTSTSTVYMELSNLRSDDTAVYYCAKSWVSWFASWGQGTLVTVSSGGGGSGGGGSGGGGSDIVMTQSPDSLAVSLGERATINCKSSQSVLNSSNNRNYLAWYQQKPGQPPKLLIYWASTRESGVPDRFSGSGSGTDFTLTISGLQAEDVAVYYCQQHYSTPFTFGPGTKVDIKSGGGGSEVQLVESGGGLVQPGGSLKLSCAASGFTFNKYAMNWVRQAPGKGLEWVARIRSKYNNYATYYADSVKDRFTISRDDSKNTAYLQMNNLKTEDTAVYYCVRHGNFGNSYISYWAYWGQGTLVTVSSGGGGSGGGGSGGGGSQTVVTQEPSLTVSPGGTVTLTCGSSTGAVTSGNYPNWVQQKPGQAPRGLIGGTKFLAPGTPARFSGSLLGGKAALTLSGVQPEDEAEYYCVLWYSNRWVFGGGTKLTVL

SEQ ID NO: 220 - DNA, 1500 bp, synthetic construct
  misc_feature 1..1500: note = MCSP-D2 VH-VL x I2C VH-VL
  source 1..1500: mol_type = other DNA
caggtgcagctggtccagtctggggctgaggtgaagaagcctggggcctcagtgaaggtctcctgcaaggcttctggatacaccttcaccggctactatatgcactgggtgcgacaggcccctggacaagggcttgagtggatgggatggatcaaccctaacagtggtggcacaagctacgcacagaagttccagggcagagtcaccatgactagggacacgtccacgagcacagtctacatggagctgagcaacctgagatctgacgacacggccgtgtattactgtgcgaaatcctgggtctcctggtttgcttcctggggtcaaggaaccttggtcaccgtctcctcaggtggtggtggttctggcggcggcggctccggtggtggtggttctgatatcgtgatgacccagtctccagactccctggctgtgtctctgggcgagagggccaccatcaactgcaagtccagccagagtgttttaaacagctccaacaataggaactacttagcttggtaccagcagaaaccaggacagcctcctaagctgctcatttactgggcatctacccgggaatccggggtccctgaccgattcagtggcagcgggtctgggacagatttcactctcaccatcagtggcctgcaggctgaagatgtggcagtttattactgtcagcaacattatagtactccattcacttttggccctgggaccaaagtggatatcaaatccggaggtggtggatccgaggtgcagctggtcgagtctggaggaggattggtgcagcctggagggtcattgaaactctcatgtgcagcctctggattcaccttcaataagtacgccatgaactgggtccgccaggctccaggaaagggtttggaatgggttgctcgcataagaagtaaatataataattatgcaacatattatgccgattcagtgaaagacaggttcaccatctccagagatgattcaaaaaacactgcctatctacaaatgaacaacttgaaaactgaggacactgccgtgtactactgtgtgagacatgggaacttcggtaatagctacatatcctactgggcttactggggccaagggactctggtcaccgtctcctcaggtggtggtggttctggcggcggcggctccggtggtggtggttctcagactgttgtgactcaggaaccttcactcaccgtatcacctggtggaacagtcacactcacttgtggctcctcgactggggctgttacatctggcaactacccaaactgggtccaacaaaaaccaggtcaggcaccccgtggtctaataggtgggactaagttcctcgcccccggtactcctgccagattctcaggctccctgcttggaggcaaggctgccctcaccctctcaggggtacagccagaggatgaggcagaatattactgtgttctatggtacagcaaccgctgggtgttcggtggaggaaccaaactgactgtccta

SEQ ID NO: 221 - protein, 500 aa, synthetic construct
  REGION 1..500: note = MCSP-D2 VH-VL-P x H2C VH-VL-P
QVQLVQSGAEVKKPGASVKVSCKASGYTFTGYYMHWVRQAPGQGLEWMGWINPNSGGTSYAQKFQGRVTMTRDTSTSTVYMELSNLRSDDTAVYYCAKSWVSWFASWGQGTLVTVSSGGGGSGGGGSGGGGSELVMTQSPDSLAVSLGERATINCKSSQSVLNSSNNRNYLAWYQQKPGQPPKLLIYWASTRESGVPDRFSGSGSGTDFTLTISGLQAEDVAVYYCQQHYSTPFTFGPGTKVDIKSGGGGSEVQLLESGGGLVQPGGSLKLSCAASGFTFNKYAMNWVRQAPGKGLEWVARIRSKYNNYATYYADSVKDRFTISRDDSKNTAYLQMNNLKTEDTAVYYCVRHGNFGNSYISYWAYWGQGTLVTVSSGGGGSGGGGSGGGGSELVVTQEPSLTVSPGGTVTLTCGSSTGAVTSGYYPNWVQQKPGQAPRGLIGGTKFLAPGTPARFSGSLLGGKAALTLSGVQPEDEAEYYCALWYSNRWVFGGGTKLTVL

SEQ ID NO: 222 - DNA, 1500 bp, synthetic construct
  misc_feature 1..1500: note = MCSP-D2 VH-VL-P x H2C VH-VL-P
  source 1..1500: mol_type = other DNA
caggtgcagctggtccagtctggggctgaggtgaagaagcctggggcctcagtgaaggtctcctgcaaggcttctggatacaccttcaccggctactatatgcactgggtgcgacaggcccctggacaagggcttgagtggatgggatggatcaaccctaacagtggtggcacaagctacgcacagaagttccagggcagagtcaccatgactagggacacgtccacgagcacagtctacatggagctgagcaacctgagatctgacgacacggccgtgtattactgtgcgaaatcctgggtctcctggtttgcttcctggggtcaaggaaccttggtcaccgtctcctcaggtggtggtggttctggcggcggcggctccggtggtggtggttctgagctcgtgatgacccagtctccagactccctggctgtgtctctgggcgagagggccaccatcaactgcaagtccagccagagtgttttaaacagctccaacaataggaactacttagcttggtaccagcagaaaccaggacagcctcctaagctgctcatttactgggcatctacccgggaatccggggtccctgaccgattcagtggcagcgggtctgggacagatttcactctcaccatcagtggcctgcaggctgaagatgtggcagtttattactgtcagcaacattatagtactccattcacttttggccctgggaccaaagtggatatcaaatccggaggtggtggatccgaggtgcagctgctcgagtctggaggaggattggtgcagcctggagggtcattgaaactctcatgtgcagcctctggattcaccttcaataagtacgccatgaactgggtccgccaggctccaggaaagggtttggaatgggttgctcgcataagaagtaaatataataattatgcaacatattatgccgattcagtgaaagacaggttcaccatctccagagatgattcaaaaaacactgcctatctacaaatgaacaacttgaaaactgaggacactgccgtgtactactgtgtgagacatgggaacttcggtaatagctacatatcctactgggcttactggggccaagggactctggtcaccgtctcctcaggtggtggtggttctggcggcggcggctccggtggtggtggttctgagctcgttgtgactcaggaaccttcactcaccgtatcacctggtggaacagtcacactcacttgtggctcctcgactggggctgttacatctggctactacccaaactgggtccaacaaaaaccaggtcaggcaccccgtggtctaataggtgggactaagttcctcgcccccggtactcctgccagattctcaggctccctgcttggaggcaaggctgccctcaccctctcaggggtacagccagaggatgaggcagaatattactgtgctctatggtacagcaaccgctgggtgttcggtggaggaaccaaactgactgtccta

SEQ ID NO: 223 - protein, 499 aa, synthetic construct
  REGION 1..499: note = MCSP-F9 VH-VL x H2C VH-VL
QVQLQESGPGLVKPSETLSLTCVVSGGSISSSNWWSWVRQPPGKGLEWLGTIYYNGNTYYNPSLKSRVTISVDTSKNQFSLRLSSVTAADTAVYYCAKSWVSWFASWGQGTLVTVSSGGGGSGGGGSGGGGSDIVMTQSPDSLAVSLGERATINCKSSQSVLSSSNNKNYLNWYQQKPGQPPKLLIYWASTRESGVPDRFSGSGSGTDFTLTISSLQAEDVAVYYCQQHYSVPFTFGPGTKVDIKGGGGSEVQLVESGGGLVQPGGSLKLSCAASGFTFNKYAMNWVRQAPGKGLEWVARIRSKYNNYATYYADSVKDRFTISRDDSKNTAYLQMNNLKTEDTAVYYCVRHGNFGNSYISYWAYWGQGTLVTVSSGGGGSGGGGSGGGGSQTVVTQEPSLTVSPGGTVTLTCGSSTGAVTSGYYPNWVQQKPGQAPRGLIGGTKFLAPGTPARFSGSLLGGKAALTLSGVQPEDEAEYYCALWYSNRWVFGGGTKLTVL

SEQ ID NO: 224 - DNA, 1497 bp, synthetic construct
  misc_feature 1..1497: note = MCSP-F9 VH-VL x H2C VH-VL
  source 1..1497: mol_type = other DNA
caggtgcagctgcaagagtctggcccaggactggtgaagccttcggagaccctgtccctcacctgcgttgtctctggtggctccatcagcagtagtaactggtggagctgggtccgccagcccccagggaagggactggagtggcttgggactatctattataatgggaatacctactacaacccgtccctcaagagtcgagtcaccatctccgtagacacgtccaagaaccagttctccctgaggctgagctctgtgaccgccgcagacacggccgtgtattactgtgcgaaatcctgggtctcctggtttgcttcctggggtcaaggaaccttggtcaccgtctcctcaggtggtggtggttctggcggcggcggctccggtggtggtggttctgatatcgtgatgacacagtctccagactccctggctgtgtctctgggcgagagggccaccatcaactgcaagtccagccagagtgtcttatccagctccaacaataagaactacttaaattggtaccagcagaaaccaggacagcctcctaagttgctcatttactgggcatctacccgggaatccggggtccctgaccgattcagtggcagcgggtctgggacagatttcactctcaccatcagcagcctgcaggctgaagatgtggcagtttattactgtcagcaacattatagtgttccattcactttcggccctgggaccaaagtggatatcaaaggaggtggtggctccgaggtgcagctggtcgagtctggaggaggattggtgcagcctggagggtcattgaaactctcatgtgcagcctctggattcaccttcaataagtacgccatgaactgggtccgccaggctccaggaaagggtttggaatgggttgctcgcataagaagtaaatataataattatgcaacatattatgccgattcagtgaaagacaggttcaccatctccagagatgattcaaaaaacactgcctatctacaaatgaacaacttgaaaactgaggacactgccgtgtactactgtgtgagacatgggaacttcggtaatagctacatatcctactgggcttactggggccaagggactctggtcaccgtctcctcaggtggtggtggttctggcggcggcggctccggtggtggtggttctcagactgttgtgactcaggaaccttcactcaccgtatcacctggtggaacagtcacactcacttgtggctcctcgactggggctgttacatctggctactacccaaactgggtccaacaaaaaccaggtcaggcaccccgtggtctaataggtgggactaagttcctcgcccccggtactcctgccagattctcaggctccctgcttggaggcaaggctgccctcaccctctcaggggtacagccagaggatgaggcagaatattactgtgctctatggtacagcaaccgctgggtgttcggtggaggaaccaaactgactgtccta

SEQ ID NO: 225 - protein, 500 aa, synthetic construct
  REGION 1..500: note = MCSP-F9 VH-VL-P x H2C VH-VL-P
EVQLQESGPGLVKPSETLSLTCVVSGGSISSSNWWSWVRQPPGKGLEWLGTIYYNGNTYYNPSLKSRVTISVDTSKNQFSLRLSSVTAADTAVYYCAKSWVSWFASWGQGTLVTVSSGGGGSGGGGSGGGGSELVMTQSPDSLAVSLGERATINCKSSQSVLSSSNNKNYLNWYQQKPGQPPKLLIYWASTRESGVPDRFSGSGSGTDFTLTISSLQAEDVAVYYCQQHYSVPFTFGPGTKVDIKSGGGGSEVQLLESGGGLVQPGGSLKLSCAASGFTFNKYAMNWVRQAPGKGLEWVARIRSKYNNYATYYADSVKDRFTISRDDSKNTAYLQMNNLKTEDTAVYYCVRHGNFGNSYISYWAYWGQGTLVTVSSGGGGSGGGGSGGGGSELVVTQEPSLTVSPGGTVTLTCGSSTGAVTSGYYPNWVQQKPGQAPRGLIGGTKFLAPGTPARFSGSLLGGKAALTLSGVQPEDEAEYYCALWYSNRWVFGGGTKLTVL

SEQ ID NO: 226 - DNA, 1500 bp, synthetic construct
  misc_feature 1..1500: note = MCSP-F9 VH-VL-P x H2C VH-VL-P
  source 1..1500: mol_type = other DNA
gaggtgcagctgcaagagtctggcccaggactggtgaagccttcggagaccctgtccctcacctgcgttgtctctggtggctccatcagcagtagtaactggtggagctgggtccgccagcccccagggaagggactggagtggcttgggactatctattataatgggaatacctactacaacccgtccctcaagagtcgagtcaccatctccgtagacacgtccaagaaccagttctccctgaggctgagctctgtgaccgccgcagacacggccgtgtattactgtgcgaaatcctgggtctcctggtttgcttcctggggtcaaggaaccttggtcaccgtctcctcaggtggtggtggttctggcggcggcggctccggtggtggtggttctgagctcgtgatgacacagtctccagactccctggctgtgtctctgggcgagagggccaccatcaactgcaagtccagccagagtgtcttatccagctccaacaataagaactacttaaattggtaccagcagaaaccaggacagcctcctaagttgctcatttactgggcatctacccgggaatccggggtccctgaccgattcagtggcagcgggtctgggacagatttcactctcaccatcagcagcctgcaggctgaagatgtggcagtttattactgtcagcaacattatagtgttccattcactttcggccctgggaccaaagtggatatcaaatccggaggtggtggatccgaggtgcagctgctcgagtctggaggaggattggtgcagcctggagggtcattgaaactctcatgtgcagcctctggattcaccttcaataagtacgccatgaactgggtccgccaggctccaggaaagggtttggaatgggttgctcgcataagaagtaaatataataattatgcaacatattatgccgattcagtgaaagacaggttcaccatctccagagatgattcaaaaaacactgcctatctacaaatgaacaacttgaaaactgaggacactgccgtgtactactgtgtgagacatgggaacttcggtaatagctacatatcctactgggcttactggggccaagggactctggtcaccgtctcctcaggtggtggtggttctggcggcggcggctccggtggtggtggttctgagctcgttgtgactcaggaaccttcactcaccgtatcacctggtggaacagtcacactcacttgtggctcctcgactggggctgttacatctggctactacccaaactgggtccaacaaaaaccaggtcaggcaccccgtggtctaataggtgggactaagttcctcgcccccggtactcctgccagattctcaggctccctgcttggaggcaaggctgccctcaccctctcaggggtacagccagaggatgaggcagaatattactgtgctctatggtacagcaaccgctgggtgttcggtggaggaaccaaactgactgtccta

SEQ ID NO: 227 - protein, 500 aa, synthetic construct
  REGION 1..500: note = MCSP-F9 VH-VL-P x G4H VH-VL-P
EVQLQESGPGLVKPSETLSLTCVVSGGSISSSNWWSWVRQPPGKGLEWLGTIYYNGNTYYNPSLKSRVTISVDTSKNQFSLRLSSVTAADTAVYYCAKSWVSWFASWGQGTLVTVSSGGGGSGGGGSGGGGSELVMTQSPDSLAVSLGERATINCKSSQSVLSSSNNKNYLNWYQQKPGQPPKLLIYWASTRESGVPDRFSGSGSGTDFTLTISSLQAEDVAVYYCQQHYSVPFTFGPGTKVDIKSGGGGSEVQLLESGGGLVQPGGSLKLSCAASGFTFNRYAMNWVRQAPGKGLEWVARIRSKYNNYATYYADSVKGRFTISRDDSKNTAYLQMNNLKTEDTAVYYCVRHGNFGNSYLSYFAYWGQGTLVTVSSGGGGSGGGGSGGGGSELVVTQEPSLTVSPGGTVTLTCGSSTGAVTSGYYPNWVQQKPGQAPRGLIGGTKFLAPGTPARFSGSLLGGKAALTLSGVQPEDEAEYYCALWYSNRWVFGGGTKLTVL

SEQ ID NO: 228 - DNA, 1500 bp, synthetic construct
  misc_feature 1..1500: note = MCSP-F9 VH-VL-P x G4H VH-VL-P
  source 1..1500: mol_type = other DNA
gaggtgcagctgcaagagtctggcccaggactggtgaagccttcggagaccctgtccctcacctgcgttgtctctggtggctccatcagcagtagtaactggtggagctgggtccgccagcccccagggaagggactggagtggcttgggactatctattataatgggaatacctactacaacccgtccctcaagagtcgagtcaccatctccgtagacacgtccaagaaccagttctccctgaggctgagctctgtgaccgccgcagacacggccgtgtattactgtgcgaaatcctgggtctcctggtttgcttcctggggtcaaggaaccttggtcaccgtctcctcaggtggtggtggttctggcggcggcggctccggtggtggtggttctgagctcgtgatgacacagtctccagactccctggctgtgtctctgggcgagagggccaccatcaactgcaagtccagccagagtgtcttatccagctccaacaataagaactacttaaattggtaccagcagaaaccaggacagcctcctaagttgctcatttactgggcatctacccgggaatccggggtccctgaccgattcagtggcagcgggtctgggacagatttcactctcaccatcagcagcctgcaggctgaagatgtggcagtttattactgtcagcaacattatagtgttccattcactttcggccctgggaccaaagtggatatcaaatccggaggtggtggatccgaggtgcagctgctcgagtctggaggaggattggtgcagcctggagggtcattgaaactctcatgtgcagcctctggattcaccttcaatcgctacgccatgaactgggtccgccaggctccaggaaagggtttggaatgggttgctcgcataagaagtaaatataataattatgcaacatattatgccgattcagtgaaagggaggttcaccatctccagagatgattcaaaaaacactgcctatctacaaatgaacaacttgaaaactgaggacactgccgtgtactactgtgtgagacatgggaacttcggtaatagctacttatcctacttcgcttactggggccaagggactctggtcaccgtctcctcaggtggtggtggttctggcggcggcggctccggtggtggtggttctgagctcgttgtgactcaggaaccttcactcaccgtatcacctggtggaacagtcacactcacttgtggctcctcgactggggctgttacatctggctactacccaaactgggtccaacaaaaaccaggtcaggcaccccgtggtctaataggtgggactaagttcctcgcccccggtactcctgccagattctcaggctccctgcttggaggcaaggctgccctcaccctctcaggggtacagccagaggatgaggcagaatattactgtgctctatggtacagcaaccgctgggtgttcggtggaggaaccaaactgactgtccta

SEQ ID NO: 229 - protein, 267 aa, synthetic construct
  REGION 1..267: note = 1-27 CD3 epsilon-Fc
QDGNEEMGGITQTPYKVSISGTTVILTSGEPKSCDKTHTCPPCPAPELLGGPSVFLFPPKPKDTLMISRTPEVTCVVVDVSHEDPEVKFNWYVDGVEVHNAKTKPREEQYNSTYRVVSVLTVLHQDWLNGKEYKCKVSNKALPAPIEKTISKAKGQPREPQVYTLPPSREEMTKNQVSLTCLVKGFYPSDIAVEWESNGQPENNYKTTPPVLDSDGSFFLYSKLTVDKSRWQQGNVFSCSVMHEALHNHYTQKSLSLSPGKHHHHHH

SEQ ID NO: 230 - DNA, 858 bp, synthetic construct
  misc_feature 1..858: note = 1-27 CD3 epsilon-Fc
  source 1..858: mol_type = other DNA
atgggatggagctgtatcatcctcttcttggtagcaacagctacaggtgtacactcccaagatggtaatgaagaaatgggtggtattacacagacaccatataaagtctccatctctggaaccacagtaatattgacatccggagagcccaaatcttgtgacaaaactcacacatgcccaccgtgcccagcacctgaactcctggggggaccgtcagtcttcctcttccccccaaaacccaaggacaccctcatgatctcccggacccctgaggtcacatgcgtggtggtggacgtgagccacgaagaccctgaggtcaagttcaactggtacgtggacggcgtggaggtgcataatgccaagacaaagccgcgggaggagcagtacaacagcacgtaccgtgtggtcagcgtcctcaccgtcctgcaccaggactggctgaatggcaaggagtacaagtgcaaggtctccaacaaagccctcccagcccccatcgagaaaaccatctccaaagccaaagggcagccccgagaaccacaggtgtacaccctgcccccatcccgggaggagatgaccaagaaccaggtcagcctgacctgcctggtcaaaggcttctatcccagcgacatcgccgtggagtgggagagcaatgggcagccggagaacaactacaagaccacgcctcccgtgctggactccgacggctccttcttcctctatagcaagctcaccgtggacaagagcaggtggcagcaggggaacgtcttctcatgctccgtgatgcatgaggctctgcacaaccactacacgcagaagagcctctccctgtccccgggtaaacatcatcaccatcatcat

SEQ ID NO: 231 - protein, 333 aa, synthetic construct
  REGION 1..333: note = human 1-27 CD3 epsilon-EpCAM
QDGNEEMGGITQTPYKVSISGTTVILTDYKDDDDKTASFAAAQKECVCENYKLAVNCFLNDNGQCQCTSIGAQNTVLCSKLAAKCLVMKAEMNGSKLGRRAKPEGALQNNDGLYDPDCDESGLFKAKQCNGTSTCWCVNTAGVRRTDKDTEITCSERVRTYWIIIELKHKAREKPYDVQSLRTALEEAIKTRYQLDPKFITNILYEDNVITIDLVQNSSQKTQNDVDIADVAYYFEKDVKGESLFHSKKMDLRVNGEQLDLDPGQTLIYYVDEKAPEFSMQGLKAGVIAVIVVVVIAIVAGIVVLVISRKKRMAKYEKAEIKEMGEMHRELNA

SEQ ID NO: 232 - DNA, 1056 bp, synthetic construct
  misc_feature 1..1056: note = human 1-27 CD3 epsilon-EpCAM
  source 1..1056: mol_type = other DNA
atgggatggagctgtatcatcctcttcttggtagcaacagctacaggtgtacactcccaagatggtaatgaagaaatgggtggtattacacagacaccatataaagtctccatctctggaaccacagtaatattgacagattacaaggacgacgatgacaagactgcgagttttgccgcagctcagaaagaatgtgtctgtgaaaactacaagctggccgtaaactgctttttgaatgacaatggtcaatgccagtgtacttcgattggtgcacaaaatactgtcctttgctcaaagctggctgccaaatgtttggtgatgaaggcagaaatgaacggctcaaaacttgggagaagagcgaaacctgaaggggctctccagaacaatgatggcctttacgatcctgactgcgatgagagcgggctctttaaggccaagcagtgcaacggcacctccacgtgctggtgtgtgaacactgctggggtcagaagaactgacaaggacactgaaataacctgctctgagcgagtgagaacctactggatcatcattgaattaaaacacaaagcaagagaaaaaccttatgatgttcaaagtttgcggactgcacttgaggaggcgatcaaaacgcgttatcaactggatccaaaatttatcacaaatattttgtatgaggataatgttatcactattgatctggttcaaaattcttctcagaaaactcagaatgatgtggacatagctgatgtggcttattattttgaaaaagatgttaaaggtgaatccttgtttcattctaagaaaatggacctgagagtaaatggggaacaactggatctggatcctggtcaaactttaatttattatgtcgatgaaaaagcacctgaattctcaatgcagggtctaaaagctggtgttattgctgttattgtggttgtggtgatagcaattgttgctggaattgttgtgctggttatttccagaaagaagagaatggcaaagtatgagaaggctgagataaaggagatgggtgagatgcatagggaactcaatgca

SEQ ID NO: 233 - protein, 333 aa, synthetic construct
  REGION 1..333: note = marmoset 1-27 CD3 epsilon-EpCAM
QDGNEEMGDTTQNPYKVSISGTTVTLTDYKDDDDKTASFAAAQKECVCENYKLAVNCFLNDNGQCQCTSIGAQNTVLCSKLAAKCLVMKAEMNGSKLGRRAKPEGALQNNDGLYDPDCDESGLFKAKQCNGTSTCWCVNTAGVRRTDKDTEITCSERVRTYWIIIELKHKAREKPYDVQSLRTALEEAIKTRYQLDPKFITNILYEDNVITIDLVQNSSQKTQNDVDIADVAYYFEKDVKGESLFHSKKMDLRVNGEQLDLDPGQTLIYYVDEKAPEFSMQGLKAGVIAVIVVVVIAIVAGIVVLVISRKKRMAKYEKAEIKEMGEMHRELNA

SEQ ID NO: 234 - DNA, 1056 bp, synthetic construct
  misc_feature 1..1056: note = marmoset 1-27 CD3 epsilon-EpCAM
  source 1..1056: mol_type = other DNA
atgggatggagctgtatcatcctcttcttggtagcaacagctacaggtgtacactcccaggacggtaatgaagaaatgggtgatactacacagaacccatataaagtttccatctcaggaaccacagtaacactgacagattacaaggacgacgatgacaagactgcgagttttgccgcagctcagaaagaatgtgtctgtgaaaactacaagctggccgtaaactgctttttgaatgacaatggtcaatgccagtgtacttcgattggtgcacaaaatactgtcctttgctcaaagctggctgccaaatgtttggtgatgaaggcagaaatgaacggctcaaaacttgggagaagagcgaaacctgaaggggctctccagaacaatgatggcctttacgatcctgactgcgatgagagcgggctctttaaggccaagcagtgcaacggcacctccacgtgctggtgtgtgaacactgctggggtcagaagaactgacaaggacactgaaataacctgctctgagcgagtgagaacctactggatcatcattgaattaaaacacaaagcaagagaaaaaccttatgatgttcaaagtttgcggactgcacttgaggaggcgatcaaaacgcgttatcaactggatccaaaatttatcacaaatattttgtatgaggataatgttatcactattgatctggttcaaaattcttctcagaaaactcagaatgatgtggacatagctgatgtggcttattattttgaaaaagatgttaaaggtgaatccttgtttcattctaagaaaatggacctgagagtaaatggggaacaactggatctggatcctggtcaaactttaatttattatgtcgatgaaaaagcacctgaattctcaatgcagggtctaaaagctggtgttattgctgttattgtggttgtggtgatagcaattgttgctggaattgttgtgctggttatttccagaaagaagagaatggcaaagtatgagaaggctgagataaaggagatgggtgagatgcatagggaactcaatgca

SEQ ID NO: 235 - protein, 333 aa, synthetic construct; identical to SEQ ID NO: 233
  REGION 1..333: note = tamarin 1-27 CD3 epsilon-EpCAM

SEQ ID NO: 236 - DNA, 1056 bp, synthetic construct; identical to SEQ ID NO: 234
  misc_feature 1..1056: note = tamarin 1-27 CD3 epsilon-EpCAM
  source 1..1056: mol_type = other DNA

SEQ ID NO: 237 - protein, 333 aa, synthetic construct
  REGION 1..333: note = squirrel monkey 1-27 CD3 epsilon-EpCAM
QDGNEEIGDTTQNPYKVSISGTTVTLTDYKDDDDKTASFAAAQKECVCENYKLAVNCFLNDNGQCQCTSIGAQNTVLCSKLAAKCLVMKAEMNGSKLGRRAKPEGALQNNDGLYDPDCDESGLFKAKQCNGTSTCWCVNTAGVRRTDKDTEITCSERVRTYWIIIELKHKAREKPYDVQSLRTALEEAIKTRYQLDPKFITNILYEDNVITIDLVQNSSQKTQNDVDIADVAYYFEKDVKGESLFHSKKMDLRVNGEQLDLDPGQTLIYYVDEKAPEFSMQGLKAGVIAVIVVVVIAIVAGIVVLVISRKKRMAKYEKAEIKEMGEMHRELNA

SEQ ID NO: 238 - DNA, 1056 bp, synthetic construct
  misc_feature 1..1056: note = squirrel monkey 1-27 CD3 epsilon-EpCAM
  source 1..1056: mol_type = other DNA
atgggatggagctgtatcatcctcttcttggtagcaacagctacaggtgtacactcccaggacggtaatgaagagattggtgatactacccagaacccatataaagtttccatctcaggaaccacagtaacactgacagattacaaggacgacgatgacaagactgcgagttttgccgcagctcagaaagaatgtgtctgtgaaaactacaagctggccgtaaactgctttttgaatgacaatggtcaatgccagtgtacttcgattggtgcacaaaatactgtcctttgctcaaagctggctgccaaatgtttggtgatgaaggcagaaatgaacggctcaaaacttgggagaagagcgaaacctgaaggggctctccagaacaatgatggcctttacgatcctgactgcgatgagagcgggctctttaaggccaagcagtgcaacggcacctccacgtgctggtgtgtgaacactgctggggtcagaagaactgacaaggacactgaaataacctgctctgagcgagtgagaacctactggatcatcattgaattaaaacacaaagcaagagaaaaaccttatgatgttcaaagtttgcggactgcacttgaggaggcgatcaaaacgcgttatcaactggatccaaaatttatcacaaatattttgtatgaggataatgttatcactattgatctggttcaaaattcttctcagaaaactcagaatgatgtggacatagctgatgtggcttattattttgaaaaagatgttaaaggtgaatccttgtttcattctaagaaaatggacctgagagtaaatggggaacaactggatctggatcctggtcaaactttaatttattatgtcgatgaaaaagcacctgaattctcaatgcagggtctaaaagctggtgttattgctgttattgtggttgtggtgatagcaattgttgctggaattgttgtgctggttatttccagaaagaagagaatggcaaagtatgagaaggctgagataaaggagatgggtgagatgcatagggaactcaatgca

SEQ ID NO: 239 - protein, 333 aa, synthetic construct
  REGION 1..333: note = swine 1-27 CD3 epsilon-EpCAM
QEDIERPDEDTQKTFKVSISGDKVELTDYKDDDDKTASFAAAQKECVCENYKLAVNCFLNDNGQCQCTSIGAQNTVLCSKLAAKCLVMKAEMNGSKLGRRAKPEGALQNNDGLYDPDCDESGLFKAKQCNGTSTCWCVNTAGVRRTDKDTEITCSERVRTYWIIIELKHKAREKPYDVQSLRTALEEAIKTRYQLDPKFITNILYEDNVITIDLVQNSSQKTQNDVDIADVAYYFEKDVKGESLFHSKKMDLRVNGEQLDLDPGQTLIYYVDEKAPEFSMQGLKAGVIAVIVVVVIAIVAGIVVLVISRKKRMAKYEKAEIKEMGEMHRELNA

SEQ ID NO: 240 - DNA, 1056 bp, synthetic construct
  misc_feature 1..1056: note = swine 1-27 CD3 epsilon-EpCAM
  source 1..1056: mol_type = other DNA
atgggatggagctgtatcatcctcttcttggtagcaacagctacaggtgtacactcccaagaagacattgaaagaccagatgaagatacacagaaaacatttaaagtctccatctctggagacaaagtagagctgacagattacaaggacgacgatgacaagactgcgagttttgccgcagctcagaaagaatgtgtctgtgaaaactacaagctggccgtaaactgctttttgaatgacaatggtcaatgccagtgtacttcgattggtgcacaaaatactgtcctttgctcaaagctggctgccaaatgtttggtgatgaaggcagaaatgaacggctcaaaacttgggagaagagcgaaacctgaaggggctctccagaacaatgatggcctttacgatcctgactgcgatgagagcgggctctttaaggccaagcagtgcaacggcacctccacgtgctggtgtgtgaacactgctggggtcagaagaactgacaaggacactgaaataacctgctctgagcgagtgagaacctactggatcatcattgaattaaaacacaaagcaagagaaaaaccttatgatgttcaaagtttgcggactgcacttgaggaggcgatcaaaacgcgttatcaactggatccaaaatttatcacaaatattttgtatgaggataatgttatcactattgatctggttcaaaattcttctcagaaaactcagaatgatgtggacatagctgatgtggcttattattttgaaaaagatgttaaaggtgaatccttgtttcattctaagaaaatggacctgagagtaaatggggaacaactggatctggatcctggtcaaactttaatttattatgtcgatgaaaaagcacctgaattctcaatgcagggtctaaaagctggtgttattgctgttattgtggttgtggtgatagcaattgttgctggaattgttgtgctggttatttccagaaagaagagaatggcaaagtatgagaaggctgagataaaggagatgggtgagatgcatagggaactcaatgca

SEQ ID NO: 241 - protein, 186 aa, Homo sapiens
QDGNEEMGGITQTPYKVSISGTTVILTCPQYPGSEILWQHNDKNIGGDEDDKNIGSDEDHLSLKEFSELEQSGYYVCYPRGSKPEDANFYLYLRARVCENCMEMDVMSVATIVIVDICITGGLLLLVYYWSKNRKAKAKPVTRGAGAGGRQRGQNKERPPPVPNPDYEPIRKGQRDLYSGLNQRRI

SEQ ID NO: 242 - DNA, 621 bp, Homo sapiens
  source 1..621: mol_type = genomic DNA
atgcagtcgggcactcactggagagttctgggcctctgcctcttatcagttggcgtttgggggcaagatggtaatgaagaaatgggtggtattacacagacaccatataaagtctccatctctggaaccacagtaatattgacatgccctcagtatcctggatctgaaatactatggcaacacaatgataaaaacataggcggtgatgaggatgataaaaacataggcagtgatgaggatcacctgtcactgaaggaattttcagaattggagcaaagtggttattatgtctgctaccccagaggaagcaaaccagaagatgcgaacttttatctctacctgagggcacgcgtgtgtgagaactgcatggagatggatgtgatgtcggtggccacaattgtcatagtggacatctgcatcactgggggcttgctgctgctggtttactactggagcaagaatagaaaggccaaggccaagcctgtgacacgaggagcgggtgctggcggcaggcaaaggggacaaaacaaggagaggccaccacctgttcccaacccagactatgagcccatccggaaaggccagcgggacctgtattctggcctgaatcagagacgcatc

SEQ ID NO: 243 - protein, 19 aa, synthetic construct
  REGION 1..19: note = 19 amino acid immunoglobulin leader peptide
MGWSCIILFLVATATGVHS

SEQ ID NO: 244 - DNA, 57 bp, synthetic construct
  misc_feature 1..57: note = 19 amino acid immunoglobulin leader peptide coding sequence
  source 1..57: mol_type = other DNA
atgggatggagctgtatcatcctcttcttggtagcaacagctacaggtgtacactcc

SEQ ID NO: 245 - protein, 324 aa, Mus sp.
AKTTPPSVYPLAPGSAAQTNSMVTLGCLVKGYFPEPVTVTWNSGSLSSGVHTFPAVLQSDLYTLSSSVTVPSSTWPSETVTCNVAHPASSTKVDKKIVPRDCGCKPCICTVPEVSSVFIFPPKPKDVLTITLTPKVTCVVVDISKDDPEVQFSWFVDDVEVHTAQTQPREEQFNSTFRSVSELPIMHQDWLNGKEFKCRVNSAAFPAPIEKTISKTKGRPKAPQVYTIPPPKEQMAKDKVSLTCMITDFFPEDITVEWQWNGQPAENYKNTQPIMDTDGSYFVYSKLNVQKSNWEAGNTFTCSVLHEGLHNHHTEKSLSHSPGK

SEQ ID NO: 246 - DNA, 972 bp, Mus sp.
  source 1..972: mol_type = genomic DNA
gccaaaacgacacccccatctgtctatccactggcccctggatctgctgcccaaactaactccatggtgaccctgggatgcctggtcaagggctatttccctgagccagtgacagtgacctggaactctggatccctgtccagcggtgtgcacaccttcccagctgtcctgcagtctgacctctacactctgagcagctcagtgactgtcccctccagcacctggcccagcgagaccgtcacctgcaacgttgcccacccggccagcagcaccaaggtggacaagaaaattgtgcccagggattgtggttgtaagccttgcatatgtacagtcccagaagtatcatctgtcttcatcttccccccaaagcccaaggatgtgctcaccattactctgactcctaaggtcacgtgtgttgtggtagacatcagcaaggatgatcccgaggtccagttcagctggtttgtagatgatgtggaggtgcacacagctcagacgcaaccccgggaggagcagttcaacagcactttccgctcagtcagtgaacttcccatcatgcaccaggactggctcaatggcaaggagttcaaatgcagggtcaacagtgcagctttccctgcccccatcgagaaaaccatctccaaaaccaaaggcagaccgaaggctccacaggtgtacaccattccacctcccaaggagcagatggccaaggataaagtcagtctgacctgcatgataacagacttcttccctgaagacattactgtggagtggcagtggaatgggcagccagcggagaactacaagaacactcagcccatcatggacacagatggctcttacttcgtctacagcaagctcaatgtgcagaagagcaactgggaggcaggaaatactttcacctgctctgtgttacatgagggcctgcacaaccaccatactgagaagagcctctcccactctcctggtaaa

SEQ ID NO: 247 - protein, 106 aa, Homo sapiens
GQPKAAPSVTLFPPSSEELQANKATLVCLISDFYPGAVTVAWKADSSPVKAGVETTTPSKQSNNKYAASSYLSLTPEQWKSHKSYSCQVTHEGSTVEKTVAPTECS

SEQ ID NO: 248 - DNA, 318 bp, Homo sapiens
  source 1..318: mol_type = genomic DNA
ggtcagcccaaggctgccccctcggtcactctgttcccaccctcctctgaggagcttcaagccaacaaggccacactggtgtgtctcataagtgacttctacccgggagccgtgacagtggcctggaaggcagatagcagccccgtcaaggcgggagtggagaccaccacaccctccaaacaaagcaacaacaagtacgcggccagcagctacctgagcctgacgcctgagcagtggaagtcccacaaaagctacagctgccaggtcacgcatgaagggagcaccgtggagaagacagtggcccctacagaatgttca

SEQ ID NO: 249 - protein, 800 aa, Homo sapiens
DYKDDDDKSRTRSGSQLDGGLVLFSHRGTLDGGFRFRLSDGEHTSPGHFFRVTAQKQVLLSLKGSQTLTVCPGSVQPLSSQTLRASSSAGTDPQLLLYRVVRGPQLGRLFHAQQDSTGEALVNFTQAEVYAGNILYEHEMPPEPFWEAHDTLELQLSSPPARDVAATLAVAVSFEAACPQRPSHLWKNKGLWVPEGQRARITVAALDASNLLASVPSPQRSEHDVLFQVTQFPSRGQLLVSEEPLHAGQPHFLQSQLAAGQLVYAHGGGGTQQDGFHFRAHLQGPAGASVAGPQTSEAFAITVRDVNERPPQPQASVPLRLTRGSRAPISRAQLSVVDPDSAPGEIEYEVQRAPHNGFLSLVGGGLGPVTRFTQADVDSGRLAFVANGSSVAGIFQLSMSDGASPPLPMSLAVDILPSAIEVQLRAPLEVPQALGRSSLSQQQLRVVSDREEPEAAYRLIQGPQYGHLLVGGRPTSAFSQFQIDQGEVVFAFTNSSSSHDHFRVLALARGVNASAVVNVTVRALLHVWAGGPWPQGATLRLDPTVLDAGELANRTDSVPRFRLLEGPRHGRVVRVPRARTEPGGSQLVEQFTQQDLEDGRLGLEVGRPEGRAPGPAGDSLTLELWAQGVPPAVASLDFATEPYNAARPYSVALLSVPEAARTEAGKPESSTPTGEPGPMASSPEPAVAKGGFLSFLEANMFSVIIPMCLVLLLLALILPLLFYLRKRNKTGKHDVQVLTAKPRNGLAGDTETFRKVEPGQAIPLTAVPGQGPPPGGQPDPELLQFCRTPNPALKNGQYWV

SEQ ID NO: 250 - DNA, 2457 bp, Homo sapiens
  source 1..2457: mol_type = genomic DNA
atgggatggagctgtatcatcctcttcttggtagcaacagctacaggtgtacactccgactacaaagacgatgacgacaagtcccgtacgagatctggatcccaattggacggcgggctcgtgctgttctcacacagaggaaccctggatggaggcttccgcttccgcctctctgacggcgagcacacttcccccggacacttcttccgagtgacggcccagaagcaagtgctcctctcgctgaagggcagccagacactgactgtctgcccagggtccgtccagccactcagcagtcagaccctcagggccagctccagcgcaggcactgacccccagctcctgctctaccgtgtggtgcggggcccccagctaggccggctgttccacgcccagcaggacagcacaggggaggccctggtgaacttcactcaggcagaggtctacgctgggaatattctgtatgagcatgagatgccccccgagcccttttgggaggcccatgataccctagagctccagctgtcctcgccgcctgcccgggacgtggccgccacccttgctgtggctgtgtcttttgaggctgcctgtccccagcgccccagccacctctggaagaacaaaggtctctgggtccccgagggccagcgggccaggatcaccgtggctgctctggatgcctccaatctcttggccagcgttccatcaccccagcgctcagagcatgatgtgctcttccaggtcacacagttccccagccgcggccagctgttggtgtccgaggagcccctccatgctgggcagccccacttcctgcagtcccagctggctgcagggcagctagtgtatgcccacggcggtgggggcacccagcaggatggcttccactttcgtgcccacctccaggggccagcaggggcctccgtggctggaccccaaacctcagaggcctttgccatcacggtgagggatgtaaatgagcggccccctcagccacaggcctctgtcccactccggctcacccgaggctctcgtgcccccatctcccgggcccagctgagtgtggtggacccagactcagctcctggggagattgagtacgaggtccagcgggcaccccacaacggcttcctcagcctggtgggtggtggcctggggcccgtgacccgcttcacgcaagccgatgtggattcagggcggctggccttcgtggccaacgggagcagcgtggcaggcatcttccagctgagcatgtctgatggggccagcccacccctgcccatgtccctggctgtggacatcctaccatccgccatcgaggtgcagctgcgggcacccctggaggtgccccaagctttggggcgctcctcactgagccagcagcagctccgggtggtttcagatcgggaggagccagaggcagcataccggttgatccagggaccccagtatgggcatctcctggtgggcgggcggcccacctcggccttcagccaattccagatagaccagggcgaggtggtctttgccttcaccaactcctcctcctctcatgaccacttcagagtcctggcactggctaggggtgtcaatgcatcagccgtagtgaacgtcactgtgagggctctgctgcatgtgtgggcaggtgggccatggccccagggtgccaccctgcgcctggaccccaccgtcctagatgctggcgagctggccaaccgcacagacagtgtgccgcgcttccgcctcctggagggaccccggcatggccgcgtggtccgcgtgccccgagccaggacggagcccgggggcagccagctggtggagcagttcactcagcaggaccttgaggacgggaggctggggctggaggtgggcaggccagaggggagggcccccggccccgcaggtgacagtctcactctggagctgtgggcacagggcgtcccgcctgctgtggcctccctggactttgccactgagccttacaatgctgcccggccctacagcgtggccctgctcagtgtccccgaggccgcccggacggaagcagggaagccagagagcagcacccccacaggcgagccaggccccatggcatccagccctgagcccgctgtggccaagggaggcttcctgagctttctagaggccaacatgttcagcgtcatcatccccatgtgcctggtacttctgctcctggcgctcatcctgcccctgctcttctacctccgaaaacgcaacaagacgggcaagcatgacgtccaggtcctgactgccaagccccgcaacggcctggctggtgacaccgagacctttcgcaaggtggagccaggccaggccatcccgctcacagctgtgcctggccaggggccccctccaggaggccagcctgacccagagctgctgcagttctgccggacacccaaccctgcccttaagaatggccagtactgggtg

SEQ ID NO: 251 - protein, 807 aa, Macaca fascicularis
  SITE 714: note = misc_feature - Xaa can be any naturally occurring amino acid
PSNGRVVLRAAPGTEVRSFTQAQLDGGLVLFSHRGTLDGGFRFGLSDGEHTSSGHFFRVTAQKQVLLSLEGSRTLTVCPGSVQPLSSQTLRASSSAGTDPQLLLYRVVRGPQLGRLFHAQQDSTGEALVNFTQAEVYAGNILYEHEMPTEPFWEAHDTLELQLSSPPARDVAATLAVAVSFEAACPQRPSHLWKNKGLWVPEGQRAKITMAALDASNLLASVPSSQRLEHDVLFQVTQFPSRGQLLVSEEPLHAGQPHFLQSQLAAGQLVYAHGGGGTQQDGFHFRAHLQGPAGATVAGPQTSEAFAITVRDVNERPPQPQASVPLRITRGSRAPISRAQLSVVDPDSAPGEIEYEVQRAPHNGFLSLVGGGPGPVNRFTQADVDSGRLAFVANGSSVAGVFQLSMSDGASPPLPMSLAVDILPSAIEVQLQAPLEVPQALGRSSLSQQQLRVVSDREEPEAAYRLIQGPKYGHLLVGGQPASAFSQLQIDQGEVVFAFTNFSSSHDHFRVLALARGVNASAVVNITVRALLHVWAGGPWPQGATLRLDPTILDAGELANRTGSVPRFRLLEGPRHGRVVRVPRARMEPGGSQLVEQFTQQDLEDGRLGLEVGRPEGRAPSPTGDSLTLELWAQGVPPAVASLDFATEPYNAARPYSVALLSVPEATRTEAGKPESSTPTGEPGPMASSPVPAVAKGGFLGFLEANMFSVIIPXCLVLLLLALILPLLFYLRKRNKTGKHDVQVLTAKPRNGLAGDTETFRKVEPGQAIPLTAVPGQGPPPGGQPDPELLQFCRTPNPALKNGQYWV

SEQ ID NO: 252 - DNA, 2421 bp, Macaca fascicularis
  source 1..2421: mol_type = genomic DNA
cccagcaacggacgggtagtgctgcgggcggcgccgggcaccgaggtgcgcagcttcacgcaggcccagctggatggcggactcgtgctgttctcacacagaggaaccctggatggaggcttccgcttcggcctctccgatggcgagcacacttcctctggacacttcttccgagtgacggcccagaagcaagtgctcctctcgctggagggcagccggacactgactgtctgcccagggtccgtgcagccactcagcagtcagaccctcagagccagctccagcgcaggcaccgacccccagctcctgctctaccgtgtggtgcggggcccccagctaggccggctgttccatgcccagcaggacagcacaggggaggccctggtgaacttcactcaggcagaggtctatgctgggaatattctgtatgagcatgagatgcccaccgagcccttctgggaggcccatgataccctagagctccagctgtcctcaccacctgcccgggacgtggctgccacccttgctgtggctgtgtcttttgaggctgcctgtccccagcgccccagccacctctggaagaacaaaggtctctgggtccccgagggccagcgggccaagatcaccatggctgccctggatgcctccaacctcttggccagcgttccatcatcccagcgcctagagcatgatgtgctcttccaggtcacgcagttccccagccggggccagctattggtgtctgaggagcccctccacgctgggcagccccacttcctgcagtcccagctggctgcagggcagctagtgtatgcccacggcggtgggggtacccaacaggatggcttccactttcgtgcccacctccaggggccagcaggggccaccgtggctggaccccaaacctcagaggcttttgccatcacggtgcgggatgtaaatgagcggccccctcagccacaggcctctgtcccactccggatcacccgaggctctcgagcccccatctcccgggcccagctgagtgtcgtggacccagactcagctcctggggagattgagtatgaggtccagcgggcaccccacaacggcttcctcagcctggtgggtggtggcccggggcccgtgaaccgcttcacgcaagccgatgtggattcggggcggctggccttcgtggccaacgggagcagcgtagcaggcgtcttccagctgagcatgtctgatggggccagcccaccgctgcccatgtccctggccgtggacatcctaccatccgccatcgaggtgcagctgcaggcacccctggaggtgccccaagctttggggcgctcctcactgagccagcagcagctccgggtggtttcagatagggaggagccagaggcagcataccgcctcatccagggaccaaagtacgggcatctcctggtgggtgggcagcccgcctcggccttcagccaactccagatagaccagggcgaggtggtctttgccttcaccaacttctcctcctctcatgaccacttcagagtcctggcactggctaggggtgtcaacgcatcagccgtagtgaacatcactgtgagggctctgctgcacgtgtgggcaggtgggccatggccccagggtgctaccctgcgcctggacccaaccatcctagatgctggcgagctggccaaccgcacaggcagtgtgccccgcttccgcctcctggagggaccccggcatggccgcgtggtccgtgtgccccgagccaggatggagcctgggggcagccagctggtggagcagttcactcagcaggaccttgaggatgggaggctggggctggaggtgggcaggccagagggaagggcccccagccccacaggcgacagtctcactctggagctgtgggcacagggcgtcccacctgctgtggcctccctggactttgccactgagccttacaatgctgcccggccctacagcgtggccctgctcagtgtccccgaggccacccggacggaagcagggaagccagagagcagcacccccacaggcgagccaggccccatggcatctagccctgtgcctgctgtggccaagggaggcttcctgggcttccttgaggccaacatgttcagtgtcatcatccccrtgtgcctggtccttctgctcctggcgctcatcttgcccctgctcttctacctccgaaaacgcaacaagacgggcaagcatgacgtccaggtcctgactgccaagccccgcaatggtctggctggtgacactgagacctttcgcaaggtggagccaggccaggccatcccgctcacagctgtgcctggccaggggccccctccgggaggccagcctgacccagagctgctgcagttctgccggacacccaaccctgcccttaagaatggccagtactgggtg

SEQ ID NO: 253 - DNA, 18 bp, synthetic construct
  misc_feature 1..18: note = PCR primer for CD3 epsilon chain - forward primer
  source 1..18: mol_type = other DNA
agagttctgggcctctgc

SEQ ID NO: 254 - DNA, 19 bp, synthetic construct
  misc_feature 1..19: note = PCR primer for CD3 epsilon chain - reverse primer
  source 1..19: mol_type = other DNA
cggatgggctcatagtctg

SEQ ID NO: 255 - protein, 192 aa, synthetic construct
  REGION 1..192: note = His6-human CD3 epsilon
HHHHHHQDGNEEMGGITQTPYKVSISGTTVILTCPQYPGSEILWQHNDKNIGGDEDDKNIGSDEDHLSLKEFSELEQSGYYVCYPRGSKPEDANFYLYLRARVCENCMEMDVMSVATIVIVDICITGGLLLLVYYWSKNRKAKAKPVTRGAGAGGRQRGQNKERPPPVPNPDYEPIRKGQRDLYSGLNQRRI

SEQ ID NO: 256 - DNA, 633 bp, synthetic construct
  misc_feature 1..633: note = His6-human CD3 epsilon
  source 1..633: mol_type = other DNA
atgggatggagctgtatcatcctcttcttggtagcaacagctacaggtgtacactcccatcatcaccatcatcatcaagatggtaatgaagaaatgggtggtattacacagacaccatataaagtctccatctctggaaccacagtaatattgacatgccctcagtatcctggatctgaaatactatggcaacacaatgataaaaacataggcggtgatgaggatgataaaaacataggcagtgatgaggatcacctgtcactgaaggaattttcagaattggagcaaagtggttattatgtctgctaccccagaggaagcaaaccagaagatgcgaacttttatctctacctgagggcacgcgtgtgtgagaactgcatggagatggatgtgatgtcggtggccacaattgtcatagtggacatctgcatcactgggggcttgctgctgctggtttactactggagcaagaatagaaaggccaaggccaagcctgtgacacgaggagcgggtgctggcggcaggcaaaggggacaaaacaaggagaggccaccacctgttcccaacccagactatgagcccatccggaaaggccagcgggacctgtattctggcctgaatcagagacgcatc

SEQ ID NO: 257 - protein, 505 aa, synthetic construct
  REGION 1..505: note = CD33 AH3 HL x H2C HL
QVQLVQSGAEVKKPGESVKVSCKASGYTFTNYGMNWVRQAPGQGLEWMGWINTYTGEPTYADDFKGRVTMSSDTSTSTAYLEINSLRSDDTAIYYCARWSWSDGYYVYFDYWGQGTTVTVSSGGGGSGGGGSGGGGSDIVMTQSPDSLTVSLGERTTINCKSSQSVLDSSKNKNSLAWYQQKPGQPPKLLLSWASTRESGIPDRFSGSGSGTDFTLTIDSLQPEDSATYYCQQSAHFPITFGQGTRLEIKSGGGGSEVQLVESGGGLVQPGGSLKLSCAASGFTFNKYAMNWVRQAPGKGLEWVARIRSKYNNYATYYADSVKDRFTISRDDSKNTAYLQMNNLKTEDTAVYYCVRHGNFGNSYISYWAYWGQGTLVTVSSGGGGSGGGGSGGGGSQTVVTQEPSLTVSPGGTVTLTCGSSTGAVTSGYYPNWVQQKPGQAPRGLIGGTKFLAPGTPARFSGSLLGGKAALTLSGVQPEDEAEYYCALWYSNRWVFGGGTKLTVL

SEQ ID NO: 258 - DNA, 1515 bp, synthetic construct
  misc_feature 1..1515: note = CD33 AH3 HL x H2C HL
  source 1..1515: mol_type = other DNA
caggtgcagctggtgcagtctggagctgaggtgaaaaagcctggagagtcagtcaaggtctcctgcaaggctagcgggtataccttcacaaactatggaatgaactgggtgaggcaggctccaggacagggtttagagtggatgggctggataaacacctacactggagagccaacatatgctgatgacttcaagggacgggttaccatgtcttcggatacctctaccagcactgcctatttggaaatcaacagcctcagaagtgatgacacggctatatattactgtgcgcgctggagttggagtgatggttactacgtttactttgactactggggccaaggcactacggtcaccgtctcctcaggtggtggtggttctggcggcggcggctccggtggtggtggttctgacatcgtgatgacacagtctccagactccctgactgtgtctctgggcgagaggaccaccatcaactgcaagtccagccagagtgttttagacagctccaagaataagaactccttagcttggtaccagcagaaaccaggacagcctcctaaattactcctttcctgggcatctacgcgggaatccgggatccctgaccgattcagtggcagcgggtctgggacagatttcactctcactattgacagcctgcagcctgaagattctgcaacttactattgtcaacagtctgcccacttcccgatcacctttggccaagggacacgactggagattaaatccggaggtggtggctccgaggtgcagctggtcgagtctggaggaggattggtgcagcctggagggtcattgaaactctcatgtgcagcctctggattcaccttcaataagtacgccatgaactgggtccgccaggctccaggaaagggtttggaatgggttgctcgcataagaagtaaatataataattatgcaacatattatgccgattcagtgaaagacaggttcaccatctccagagatgattcaaaaaacactgcctatctacaaatgaacaacttgaaaactgaggacactgccgtgtactactgtgtgagacatgggaacttcggtaatagctacatatcctactgggcttactggggccaagggactctggtcaccgtctcctcaggtggtggtggttctggcggcggcggctccggtggtggtggttctcagactgttgtgactcaggaaccttcactcaccgtatcacctggtggaacagtcacactcacttgtggctcctcgactggggctgttacatctggctactacccaaactgggtccaacaaaaaccaggtcaggcaccccgtggtctaataggtgggactaagttcctcgcccccggtactcctgccagattctcaggctccctgcttggaggcaaggctgccctcaccctctcaggggtacagccagaggatgaggcagaatattactgtgctctatggtacagcaaccgctgggtgttcggtggaggaaccaaactgactgtccta

SEQ ID NO: 259 - protein, 505 aa, synthetic construct
  REGION 1..505: note = CD33 AH3 HL x F12Q HL
QVQLVQSGAEVKKPGESVKVSCKASGYTFTNYGMNWVRQAPGQGLEWMGWINTYTGEPTYADDFKGRVTMSSDTSTSTAYLEINSLRSDDTAIYYCARWSWSDGYYVYFDYWGQGTTVTVSSGGGGSGGGGSGGGGSDIVMTQSPDSLTVSLGERTTINCKSSQSVLDSSKNKNSLAWYQQKPGQPPKLLLSWASTRESGIPDRFSGSGSGTDFTLTIDSLQPEDSATYYCQQSAHFPITFGQGTRLEIKSGGGGSEVQLVESGGGLVQPGGSLKLSCAASGFTFNSYAMNWVRQAPGKGLEWVARIRSKYNNYATYYADSVKGRFTISRDDSKNTAYLQMNNLKTEDTAVYYCVRHGNFGNSYVSWWAYWGQGTLVTVSSGGGGSGGGGSGGGGSQTVVTQEPSLTVSPGGTVTLTCGSSTGAVTSGNYPNWVQQKPGQAPRGLIGGTKFLAPGTPARFSGSLLGGKAALTLSGVQPEDEAEYYCVLWYSNRWVFGGGTKLTVL

SEQ ID NO: 260 - DNA, 1515 bp, synthetic construct
  misc_feature 1..1515: note = CD33 AH3 HL x F12Q HL
  source 1..1515: mol_type = other DNA
caggtgcagctggtgcagtctggagctgaggtgaaaaagcctggagagtcagtcaaggtctcctgcaaggctagcgggtataccttcacaaactatggaatgaactgggtgaggcaggctccaggacagggtttagagtggatgggctggataaacacctacactggagagccaacatatgctgatgacttcaagggacgggttaccatgtcttcggatacctctaccagcactgcctatttggaaatcaacagcctcagaagtgatgacacggctatatattactgtgcgcgctggagttggagtgatggttactacgtttactttgactactggggccaaggcactacggtcaccgtctcctcaggtggtggtggttctggcggcggcggctccggtggtggtggttctgacatcgtgatgacacagtctccagactccctgactgtgtctctgggcgagaggaccaccatcaactgcaagtccagccagagtgttttagacagctccaagaataagaactccttagcttggtaccagcagaaaccaggacagcctcctaaattactcctttcctgggcatctacgcgggaatccgggatccctgaccgattcagtggcagcgggtctgggacagatttcactctcactattgacagcctgcagcctgaagattctgcaacttactattgtcaacagtctgcccacttcccgatcacctttggccaagggacacgactggagattaaatccggaggtggtggctccgaggtgcagctggtcgagtctggaggaggattggtgcagcctggagggtcattgaaactctcatgtgcagcctctggattcaccttcaatagctacgccatgaactgggtccgccaggctccaggaaagggtttggaatgggttgctcgcataagaagtaaatataataattatgcaacatattatgccgattcagtgaaaggcaggttcaccatctccagagatgattcaaaaaacactgcctatctacaaatgaacaacttgaaaactgaggacactgccgtgtactactgtgtgagacatgggaacttcggtaatagctacgtttcctggtgggcttactggggccaagggactctggtcaccgtctcctcaggtggtggtggttctggcggcggcggctccggtggtggtggttctcagactgttgtgactcaggaaccttcactcaccgtatcacctggtggaacagtcacactcacttgtggctcctcgactggggctgttacatctggcaactacccaaactgggtccaacaaaaaccaggtcaggcaccccgtggtctaataggtgggactaagttcctcgcccccggtactcctgccagattctcaggctccctgcttggaggcaaggctgccctcaccctctcaggggtacagccagaggatgaggcagaatattactgtgttctatggtacagcaaccgctgggtgttcggtggaggaaccaaactgactgtccta

SEQ ID NO: 261 - protein, 505 aa, synthetic construct
  REGION 1..505: note = CD33 AH3 HL x I2C HL
QVQLVQSGAEVKKPGESVKVSCKASGYTFTNYGMNWVRQAPGQGLEWMGWINTYTGEPTYADDFKGRVTMSSDTSTSTAYLEINSLRSDDTAIYYCARWSWSDGYYVYFDYWGQGTTVTVSSGGGGSGGGGSGGGGSDIVMTQSPDSLTVSLGERTTINCKSSQSVLDSSKNKNSLAWYQQKPGQPPKLLLSWASTRESGIPDRFSGSGSGTDFTLTIDSLQPEDSATYYCQQSAHFPITFGQGTRLEIKSGGGGSEVQLVESGGGLVQPGGSLKLSCAASGFTFNKYAMNWVRQAPGKGLEWVARIRSKYNNYATYYADSVKDRFTISRDDSKNTAYLQMNNLKTEDTAVYYCVRHGNFGNSYISYWAYWGQGTLVTVSSGGGGSGGGGSGGGGSQTVVTQEPSLTVSPGGTVTLTCGSSTGAVTSGNYPNWVQQKPGQAPRGLIGGTKFLAPGTPARFSGSLLGGKAALTLSGVQPEDEAEYYCVLWYSNRWVFGGGTKLTVL

SEQ ID NO: 262 - DNA, 1515 bp, synthetic construct
  misc_feature 1..1515: note = CD33 AH3 HL x I2C HL
  source 1..1515: mol_type = other DNA
caggtgcagctggtgcagtctggagctgaggtgaaaaagcctggagagtcagtcaaggtctcctgcaaggctagcgggtataccttcacaaactatggaatgaactgggtgaggcaggctccaggacagggtttagagtggatgggctggataaacacctacactggagagccaacatatgctgatgacttcaagggacgggttaccatgtcttcggatacctctaccagcactgcctatttggaaatcaacagcctcagaagtgatgacacggctatatattactgtgcgcgctggagttggagtgatggttactacgtttactttgactactggggccaaggcactacggtcaccgtctcctcaggtggtggtggttctggcggcggcggctccggtggtggtggttctgacatcgtgatgacacagtctccagactccctgactgtgtctctgggcgagaggaccaccatcaactgcaagtccagccagagtgttttagacagctccaagaataagaactccttagcttggtaccagcagaaaccaggacagcctcctaaattactcctttcctgggcatctacgcgggaatccgggatccctgaccgattcagtggcagcgggtctgggacagatttcactctcactattgacagcctgcagcctgaagattctgcaacttactattgtcaacagtctgcccacttcccgatcacctttggccaagggacacgactggagattaaatccggaggtggtggctccgaggtgcagctggtcgagtctggaggaggattggtgcagcctggagggtcattgaaactctcatgtgcagcctctggattcaccttcaataagtacgccatgaactgggtccgccaggctccaggaaagggtttggaatgggttgctcgcataagaagtaaatataataattatgcaacatattatgccgattcagtgaaagacaggttcaccatctccagagatgattcaaaaaacactgcctatctacaaatgaacaacttgaaaactgaggacactgccgtgtactactgtgtgagacatgggaacttcggtaatagctacatatcctactgggcttactggggccaagggactctggtcaccgtctcctcaggtggtggtggttctggcggcggcggctccggtggtggtggttctcagactgttgtgactcaggaaccttcactcaccgtatcacctggtggaacagtcacactcacttgtggctcctcgactggggctgttacatctggcaactacccaaactgggtccaacaaaaaccaggtcaggcaccccgtggtctaataggtgggactaagttcctcgcccccggtactcctgccagattctcaggctccctgcttggaggcaaggctgccctcaccctctcaggggtacagccagaggatgaggcagaatattactgtgttctatggtacagcaaccgctgggtgttcggtggaggaaccaaactgactgtccta

SEQ ID NO: 263 - protein, 505 aa, synthetic construct
  REGION 1..505: note = CD33 AF5 HL x H2C HL
QVQLVQSGAEVKKPGASVKVSCKASGYTFTNYGMNWVKQAPGQGLKWMGWINTYTGEPTYADDFKGRVTMTSDTSTSTAYLELHNLRSDDTAVYYCARWSWSDGYYVYFDYWGQGTTVTVSSGGGGSGGGGSGGGGSDIVMTQSPDSLTVSLGERTTINCKSSQSVLDSSKNKNSLAWYQQKPGQPPKLLLSWASTRESGIPDRFSGSGSGTDFTLTIDSLQPEDSATYYCQQSAHFPITFGQGTRLEIKSGGGGSEVQLVESGGGLVQPGGSLKLSCAASGFTFNKYAMNWVRQAPGKGLEWVARIRSKYNNYATYYADSVKDRFTISRDDSKNTAYLQMNNLKTEDTAVYYCVRHGNFGNSYISYWAYWGQGTLVTVSSGGGGSGGGGSGGGGSQTVVTQEPSLTVSPGGTVTLTCGSSTGAVTSGYYPNWVQQKPGQAPRGLIGGTKFLAPGTPARFSGSLLGGKAALTLSGVQPEDEAEYYCALWYSNRWVFGGGTKLTVL

SEQ ID NO: 264 - DNA, 1515 bp, synthetic construct
  misc_feature 1..1515: note = CD33 AF5 HL x H2C HL
  source 1..1515: mol_type = other DNA
caggtgcagctggtgcagtctggagctgaggtgaagaagcctggagcgtcagtcaaggtctcctgcaaggctagcgggtataccttcacaaactatggaatgaactgggtgaagcaggctccaggacagggtttaaagtggatgggctggataaacacctacactggagagccaacatatgctgatgacttcaagggacgggttaccatgacttcggatacctctaccagcactgcctatttggaactccacaacctcagaagtgatgacacggctgtatattactgtgcgcgctggagttggagtgatggttactacgtttactttgactactggggccaaggcactacggtcaccgtctcctcaggtggtggtggttctggcggcggcggctccggtggtggtggttctgacatcgtgatgacacagtctccagactccctgactgtgtctctgggcgagaggaccaccatcaactgcaagtccagccagagtgttttagacagctccaagaataagaactccttagcttggtaccagcagaaaccaggacagcctcctaaattactcctttcctgggcatctacgcgggaatccgggatccctgaccgattcagtggcagcgggtctgggacagatttcactctcactattgacagcctgcagcctgaagattctgcaacttactattgtcaacagtctgcccacttcccgatcacctttggccaagggacacgactggagattaaatccggaggtggtggctccgaggtgcagctggtcgagtctggaggaggattggtgcagcctggagggtcattgaaactctcatgtgcagcctctggattcaccttcaataagtacgccatgaactgggtccgccaggctccaggaaagggtttggaatgggttgctcgcataagaagtaaatataataattatgcaacatattatgccgattcagtgaaagacaggttcaccatctccagagatgattcaaaaaacactgcctatctacaaatgaacaacttgaaaactgaggacactgccgtgtactactgtgtgagacatgggaacttcggtaatagctacatatcctactgggcttactggggccaagggactctggtcaccgtctcctcaggtggtggtggttctggcggcggcggctccggtggtggtggttctcagactgttgtgactcaggaaccttcactcaccgtatcacctggtggaacagtcacactcacttgtggctcctcgactggggctgttacatctggctactacccaaactgggtccaacaaaaaccaggtcaggcaccccgtggtctaataggtgggactaagttcctcgcccccggtactcctgccagattctcaggctccctgcttggaggcaaggctgccctcaccctctcaggggtacagccagaggatgaggcagaatattactgtgctctatggtacagcaaccgctgggtgttcggtggaggaaccaaactgactgtccta

SEQ ID NO: 265 - protein, 505 aa, synthetic construct
  REGION 1..505: note = CD33 AF5 HL x F12Q HL
QVQLVQSGAEVKKPGASVKVSCKASGYTFTNYGMNWVKQAPGQGLKWMGWINTYTGEPTYADDFKGRVTMTSDTSTSTAYLELHNLRSDDTAVYYCARWSWSDGYYVYFDYWGQGTTVTVSSGGGGSGGGGSGGGGSDIVMTQSPDSLTVSLGERTTINCKSSQSVLDSSKNKNSLAWYQQKPGQPPKLLLSWASTRESGIPDRFSGSGSGTDFTLTIDSLQPEDSATYYCQQSAHFPITFGQGTRLEIKSGGGGSEVQLVESGGGLVQPGGSLKLSCAASGFTFNSYAMNWVRQAPGKGLEWVARIRSKYNNYATYYADSVKGRFTISRDDSKNTAYLQMNNLKTEDTAVYYCVRHGNFGNSYVSWWAYWGQGTLVTVSSGGGGSGGGGSGGGGSQTVVTQEPSLTVSPGGTVTLTCGSSTGAVTSGNYPNWVQQKPGQAPRGLIGGTKFLAPGTPARFSGSLLGGKAALTLSGVQPEDEAEYYCVLWYSNRWVFGGGTKLTVL

SEQ ID NO: 266 - DNA, 1515 bp, synthetic construct
  misc_feature 1..1515: note = CD33 AF5 HL x F12Q HL
  source 1..1515: mol_type = other DNA
caggtgcagctggtgcagtctggagctgaggtgaagaagcctggagcgtcagtcaaggtctcctgcaaggctagcgggtataccttcacaaactatggaatgaactgggtgaagcaggctccaggacagggtttaaagtggatgggctggataaacacctacactggagagccaacatatgctgatgacttcaagggacgggttaccatgacttcggatacctctaccagcactgcctatttggaactccacaacctcagaagtgatgacacggctgtatattactgtgcgcgctggagttggagtgatggttactacgtttactttgactactggggccaaggcactacggtcaccgtctcctcaggtggtggtggttctggcggcggcggctccggtggtggtggttctgacatcgtgatgacacagtctccagactccctgactgtgtctctgggcgagaggaccaccatcaactgcaagtccagccagagtgttttagacagctccaagaataagaactccttagcttggtaccagcagaaaccaggacagcctcctaaattactcctttcctgggcatctacgcgggaatccgggatccctgaccgattcagtggcagcgggtctgggacagatttcactctcactattgacagcctgcagcctgaagattctgcaacttactattgtcaacagtctgcccacttcccgatcacctttggccaagggacacgactggagattaaatccggaggtggtggctccgaggtgcagctggtcgagtctggaggaggattggtgcagcctggagggtcattgaaactctcatgtgcagcctctggattcaccttcaatagctacgccatgaactgggtccgccaggctccaggaaagggtttggaatgggttgctcgcataagaagtaaatataataattatgcaacatattatgccgattcagtgaaaggcaggttcaccatctccagagatgattcaaaaaacactgcctatctacaaatgaacaacttgaaaactgaggacactgccgtgtactactgtgtgagacatgggaacttcggtaatagctacgtttcctggtgggcttactggggccaagggactctggtcaccgtctcctcaggtggtggtggttctggcggcggcggctccggtggtggtggttctcagactgttgtgactcaggaaccttcactcaccgtatcacctggtggaacagtcacactcacttgtggctcctcgactggggctgttacatctggcaactacccaaactgggtccaacaaaaaccaggtcaggcaccccgtggtctaataggtgggactaagttcctcgcccccggtactcctgccagattctcaggctccctgcttggaggcaaggctgccctcaccctctcaggggtacagccagaggatgaggcagaatattactgtgttctatggtacagcaaccgctgggtgttcggtggaggaaccaaactgactgtccta

SEQ ID NO: 267 - protein, 505 aa, synthetic construct
  REGION 1..505: note = CD33 AF5 HL x I2C HL
QVQLVQSGAEVKKPGASVKVSCKASGYTFTNYGMNWVKQAPGQGLKWMGWINTYTGEPTYADDFKGRVTMTSDTSTSTAYLELHNLRSDDTAVYYCARWSWSDGYYVYFDYWGQGTTVTVSSGGGGSGGGGSGGGGSDIVMTQSPDSLTVSLGERTTINCKSSQSVLDSSKNKNSLAWYQQKPGQPPKLLLSWASTRESGIPDRFSGSGSGTDFTLTIDSLQPEDSATYYCQQSAHFPITFGQGTRLEIKSGGGGSEVQLVESGGGLVQPGGSLKLSCAASGFTFNKYAMNWVRQAPGKGLEWVARIRSKYNNYATYYADSVKDRFTISRDDSKNTAYLQMNNLKTEDTAVYYCVRHGNFGNSYISYWAYWGQGTLVTVSSGGGGSGGGGSGGGGSQTVVTQEPSLTVSPGGTVTLTCGSSTGAVTSGNYPNWVQQKPGQAPRGLIGGTKFLAPGTPARFSGSLLGGKAALTLSGVQPEDEAEYYCVLWYSNRWVFGGGTKLTVL

SEQ ID NO: 268 - DNA, 1515 bp, synthetic construct
  misc_feature 1..1515: note = CD33 AF5 HL x I2C HL
  source 1..1515: mol_type = other DNA
caggtgcagctggtgcagtctggagctgaggtgaagaagcctggagcgtcagtcaaggtctcctgcaaggctagcgggtataccttcacaaactatggaatgaactgggtgaagcaggctccaggacagggtttaaagtggatgggctggataaacacctacactggagagccaacatatgctgatgacttcaagggacgggttaccatgacttcggatacctctaccagcactgcctatttggaactccacaacctcagaagtgatgacacggctgtatattactgtgcgcgctggagttggagtgatggttactacgtttactttgactactggggccaaggcactacggtcaccgtctcctcaggtggtggtggttctggcggcggcggctccggtggtggtggttctgacatcgtgatgacacagtctccagactccctgactgtgtctctgggcgagaggaccaccatcaactgcaagtccagccagagtgttttagacagctccaagaataagaactccttagcttggtaccagcagaaaccaggacagcctcctaaattactcctttcctgggcatctacgcgggaatccgggatccctgaccgattcagtggcagcgggtctgggacagatttcactctcactattgacagcctgcagcctgaagattctgcaacttactattgtcaacagtctgcccacttcccgatcacctttggccaagggacacgactggagattaaatccggaggtggtggctccgaggtgcagctggtcgagtctggaggaggattggtgcagcctggagggtcattgaaactctcatgtgcagcctctggattcaccttcaataagtacgccatgaactgggtccgccaggctccaggaaagggtttggaatgggttgctcgcataagaagtaaatataataattatgcaacatattatgccgattcagtgaaagacaggttcaccatctccagagatgattcaaaaaacactgcctatctacaaatgaacaacttgaaaactgaggacactgccgtgtactactgtgtgagacatgggaacttcggtaatagctacatatcctactgggcttactggggccaagggactctggtcaccgtctcctcaggtggtggtggttctggcggcggcggctccggtggtggtggttctcagactgttgtgactcaggaaccttcactcaccgtatcacctggtggaacagtcacactcacttgtggctcctcgactggggctgttacatctggcaactacccaaactgggtccaacaaaaaccaggtcaggcaccccgtggtctaataggtgggactaagttcctcgcccccggtactcctgccagattctcaggctccctgcttggaggcaaggctgccctcaccctctcaggggtacagccagaggatgaggcagaatattactgtgttctatggtacagcaaccgctgggtgttcggtggaggaaccaaactgactgtccta

SEQ ID NO: 269 - protein, 505 aa, synthetic construct
  REGION 1..505: note = CD33 AC8 HL x H2C HL
QVQLVQSGAEVKKPGESVKVSCKASGYTFTNYGMNWVKQAPGQGLKWMGWINTYTGEPTYADDFKGRVTMTTDTSTSTAYMEIRNLRNDDTAVYYCARWSWSDGYYVYFDYWGQGTTVTVSSGGGGSGGGGSGGGGSDIVMTQSPDSLTVSLGERTTINCKSSQSVLDSSKNKNSLAWYQQKPGQPPKLLLSWASTRESGIPDRFSGSGSGTDFTLTIDSLQPEDSATYYCQQSAHFPITFGQGTRLEIKSGGGGSEVQLVESGGGLVQPGGSLKLSCAASGFTFNKYAMNWVRQAPGKGLEWVARIRSKYNNYATYYADSVKDRFTISRDDSKNTAYLQMNNLKTEDTAVYYCVRHGNFGNSYISYWAYWGQGTLVTVSSGGGGSGGGGSGGGGSQTVVTQEPSLTVSPGGTVTLTCGSSTGAVTSGYYPNWVQQKPGQAPRGLIGGTKFLAPGTPARFSGSLLGGKAALTLSGVQPEDEAEYYCALWYSNRWVFGGGTKLTVL

SEQ ID NO: 270 - DNA, 1515 bp, synthetic construct
  misc_feature 1..1515: note = CD33 AC8 HL x H2C HL
  source 1..1515: mol_type = other DNA
caggtgcagctggtgcagtctggagctgaggtgaagaagcctggagagtcagtcaaggtctcctgcaaggctagcgggtataccttcacaaactatggaatgaactgggtgaagcaggctccaggacagggtttaaagtggatgggctggataaacacctacactggagagccaacatatgctgatgacttcaagggacgggttaccatgactacggatacctctaccagcactgcctatatggaaatccgcaacctcagaaatgatgacacggctgtatattactgtgcgcgctggagttggagtgatggttactacgtttactttgactactggggccaaggcactacggtcaccgtctcctcaggtggtggtggttctggcggcggcggctccggtggtggtggttctgacatcgtgatgacacagtctccagactccctgactgtgtctctgggcgagaggaccaccatcaactgcaagtccagccagagtgttttagacagctccaagaataagaactccttagcttggtaccagcagaaaccaggacagcctcctaaattactcctttcctgggcatctacgcgggaatccgggatccctgaccgattcagtggcagcgggtctgggacagatttcactctcactattgacagcctgcagcctgaagattctgcaacttactattgtcaacagtctgcccacttcccgatcacctttggccaagggacacgactggagattaaatccggaggtggtggctccgaggtgcagctggtcgagtctggaggaggattggtgcagcctggagggtcattgaaactctcatgtgcagcctctggattcaccttcaataagtacgccatgaactgggtccgccaggctccaggaaagggtttggaatgggttgctcgcataagaagtaaatataataattatgcaacatattatgccgattcagtgaaagacaggttcaccatctccagagatgattcaaaaaacactgcctatctacaaatgaacaacttgaaaactgaggacactgccgtgtactactgtgtgagacatgggaacttcggtaatagctacatatcctactgggcttactggggccaagggactctggtcaccgtctcctcaggtggtggtggttctggcggcggcggctccggtggtggtggttctcagactgttgtgactcaggaaccttcactcaccgtatcacctggtggaacagtcacactcacttgtggctcctcgactggggctgttacatctggctactacccaaactgggtccaacaaaaaccaggtcaggcaccccgtggtctaataggtgggactaagttcctcgcccccggtactcctgccagattctcaggctccctgcttggaggcaaggctgccctcaccctctcaggggtacagccagaggatgaggcagaatattactgtgctctatggtacagcaaccgctgggtgttcggtggaggaaccaaactgactgtccta

SEQ ID NO: 271 - protein, 505 aa, synthetic construct
  REGION 1..505: note = CD33 AC8 HL x F12Q HL
QVQLVQSGAEVKKPGESVKVSCKASGYTFTNYGMNWVKQAPGQGLKWMGWINTYTGEPTYADDFKGRVTMTTDTSTSTAYMEIRNLRNDDTAVYYCARWSWSDGYYVYFDYWGQGTTVTVSSGGGGSGGGGSGGGGSDIVMTQSPDSLTVSLGERTTINCKSSQSVLDSSKNKNSLAWYQQKPGQPPKLLLSWASTRESGIPDRFSGSGSGTDFTLTIDSLQPEDSATYYCQQSAHFPITFGQGTRLEIKSGGGGSEVQLVESGGGLVQPGGSLKLSCAASGFTFNSYAMNWVRQAPGKGLEWVARIRSKYNNYATYYADSVKGRFTISRDDSKNTAYLQMNNLKTEDTAVYYCVRHGNFGNSYVSWWAYWGQGTLVTVSSGGGGSGGGGSGGGGSQTVVTQEPSLTVSPGGTVTLTCGSSTGAVTSGNYPNWVQQKPGQAPRGLIGGTKFLAPGTPARFSGSLLGGKAALTLSGVQPEDEAEYYCVLWYSNRWVFGGGTKLTVL

SEQ ID NO: 272 - DNA, 1515 bp, synthetic construct
  misc_feature 1..1515: note = CD33 AC8 HL x F12Q HL
  source 1..1515: mol_type = other DNA
caggtgcagctggtgcagtctggagctgaggtgaagaagcctggagagtcagtcaaggtctcctgcaaggctagcgggtataccttcacaaactatggaatgaactgggtgaagcaggctccaggacagggtttaaagtggatgggctggataaacacctacactggagagccaacatatgctgatgacttcaagggacgggttaccatgactacggatacctctaccagcactgcctatatggaaatccgcaacctcagaaatgatgacacggctgtatattactgtgcgcgctggagttggagtgatggttactacgtttactttgactactggggccaaggcactacggtcaccgtctcctcaggtggtggtggttctggcggcggcggctccggtggtggtggttctgacatcgtgatgacacagtctccagactccctgactgtgtctctgggcgagaggaccaccatcaactgcaagtccagccagagtgttttagacagctccaagaataagaactccttagcttggtaccagcagaaaccaggacagcctcctaaattactcctttcctgggcatctacgcgggaatccgggatccctgaccgattcagtggcagcgggtctgggacagatttcactctcactattgacagcctgcagcctgaagattctgcaacttactattgtcaacagtctgcccacttcccgatcacctttggccaagggacacgactggagattaaatccggaggtggtggctccgaggtgcagctggtcgagtctggaggaggattggtgcagcctggagggtcattgaaactctcatgtgcagcctctggattcaccttcaatagctacgccatgaactgggtccgccaggctccaggaaagggtttggaatgggttgctcgcataagaagtaaatataataattatgcaacatattatgccgattcagtgaaaggcaggttcaccatctccagagatgattcaaaaaacactgcctatctacaaatgaacaacttgaaaactgaggacactgccgtgtactactgtgtgagacatgggaacttcggtaatagctacgtttcctggtgggcttactggggccaagggactctggtcaccgtctcctcaggtggtggtggttctggcggcggcggctccggtggtggtggttctcagactgttgtgactcaggaaccttcactcaccgtatcacctggtggaacagtcacactcacttgtggctcctcgactggggctgttacatctggcaactacccaaactgggtccaacaaaaaccaggtcaggcaccccgtggtctaataggtgggactaagttcctcgcccccggtactcctgccagattctcaggctccctgcttggaggcaaggctgccctcaccctctcaggggtacagccagaggatgaggcagaatattactgtgttctatggtacagcaaccgctgggtgttcggtggaggaaccaaactgactgtccta

SEQ ID NO: 273 - protein, 505 aa, synthetic construct
  REGION 1..505: note = CD33 AC8 HL x I2C HL
QVQLVQSGAEVKKPGESVKVSCKASGYTFTNYGMNWVKQAPGQGLKWMGWINTYTGEPTYADDFKGRVTMTTDTSTSTAYMEIRNLRNDDTAVYYCARWSWSDGYYVYFDYWGQGTTVTVSSGGGGSGGGGSGGGGSDIVMTQSPDSLTVSLGERTTINCKSSQSVLDSSKNKNSLAWYQQKPGQPPKLLLSWASTRESGIPDRFSGSGSGTDFTLTIDSLQPEDSATYYCQQSAHFPITFGQGTRLEIKSGGGGSEVQLVESGGGLVQPGGSLKLSCAASGFTFNKYAMNWVRQAPGKGLEWVARIRSKYNNYATYYADSVKDRFTISRDDSKNTAYLQMNNLKTEDTAVYYCVRHGNFGNSYISYWAYWGQGTLVTVSSGGGGSGGGGSGGGGSQTVVTQEPSLTVSPGGTVTLTCGSSTGAVTSGNYPNWVQQKPGQAPRGLIGGTKFLAPGTPARFSGSLLGGKAALTLSGVQPEDEAEYYCVLWYSNRWVFGGGTKLTVL

SEQ ID NO: 274 - DNA, 1515 bp, synthetic construct
  misc_feature 1..1515: note = CD33 AC8 HL x I2C HL
  source 1..1515: mol_type = other DNA
caggtgcagctggtgcagtctggagctgaggtgaagaagcctggagagtcagtcaaggtctcctgcaaggctagcgggtataccttcacaaactatggaatgaactgggtgaagcaggctccaggacagggtttaaagtggatgggctggataaacacctacactggagagccaacatatgctgatgacttcaagggacgggttaccatgactacggatacctctaccagcactgcctatatggaaatccgcaacctcagaaatgatgacacggctgtatattactgtgcgcgctggagttggagtgatggttactacgtttactttgactactggggccaaggcactacggtcaccgtctcctcaggtggtggtggttctggcggcggcggctccggtggtggtggttctgacatcgtgatgacacagtctccagactccctgactgtgtctctgggcgagaggaccaccatcaactgcaagtccagccagagtgttttagacagctccaagaataagaactccttagcttggtaccagcagaaaccaggacagcctcctaaattactcctttcctgggcatctacgcgggaatccgggatccctgaccgattcagtggcagcgggtctgggacagatttcactctcactattgacagcctgcagcctgaagattctgcaacttactattgtcaacagtctgcccacttcccgatcacctttggccaagggacacgactggagattaaatccggaggtggtggctccgaggtgcagctggtcgagtctggaggaggattggtgcagcctggagggtcattgaaactctcatgtgcagcctctggattcaccttcaataagtacgccatgaactgggtccgccaggctccaggaaagggtttggaatgggttgctcgcataagaagtaaatataataattatgcaacatattatgccgattcagtgaaagacaggttcaccatctccagagatgattcaaaaaacactgcctatctacaaatgaacaacttgaaaactgaggacactgccgtgtactactgtgtgagacatgggaacttcggtaatagctacatatcctactgggcttactggggccaagggactctggtcaccgtctcctcaggtggtggtggttctggcggcggcggctccggtggtggtggttctcagactgttgtgactcaggaaccttcactcaccgtatcacctggtggaacagtcacactcacttgtggctcctcgactggggctgttacatctggcaactacccaaactgggtccaacaaaaaccaggtcaggcaccccgtggtctaataggtgggactaagttcctcgcccccggtactcctgccagattctcaggctccctgcttggaggcaaggctgccctcaccctctcaggggtacagccagaggatgaggcagaatattactgtgttctatggtacagcaaccgctgggtgttcggtggaggaaccaaactgactgtccta

SEQ ID NO: 275 - protein, 505 aa, synthetic construct
  REGION 1..505: note = CD33 AH11 HL x H2C HL
QVQLVQSGAEVKKPGESVKVSCKASGYTFTNYGMNWVKQAPGQGLKWMGWINTYTGEPTYADDFKGRVTMTSDTSTSTAYMEISSLRSDDTAVYYCARWSWSDGYYVYFDYWGQGTTVTVSSGGGGSGGGGSGGGGSDIVMTQSPDSLTVSLGERTTINCKSSQSVLDSSKNKNSLAWYQQKPGQPPKLLLSWASTRESGIPDRFSGSGSGTDFTLTIDSLQPEDSATYYCQQSAHFPITFGQGTRLEIKSGGGGSEVQLVESGGGLVQPGGSLKLSCAASGFTFNKYAMNWVRQAPGKGLEWVARIRSKYNNYATYYADSVKDRFTISRDDSKNTAYLQMNNLKTEDTAVYYCVRHGNFGNSYISYWAYWGQGTLVTVSSGGGGSGGGGSGGGGSQTVVTQEPSLTVSPGGTVTLTCGSSTGAVTSGYYPNWVQQKPGQAPRGLIGGTKFLAPGTPARFSGSLLGGKAALTLSGVQPEDEAEYYCALWYSNRWVFGGGTKLTVL

SEQ ID NO: 276 - DNA, 1515 bp, synthetic construct
  misc_feature 1..1515: note = CD33 AH11 HL x H2C HL
  source 1..1515: mol_type = other DNA
caggtgcagctggtgcagtctggagctgaggtgaagaagcctggagagtcagtcaaggtctcctgcaaggctagcgggtataccttcacaaactatggaatgaactgggtgaagcaggctccaggacagggtttaaagtggatgggctggataaacacctacactggagagccaacatatgctgatgacttcaagggacgggttaccatgacttcggatacctctaccagcactgcctatatggaaatcagcagcctcagaagtgatgacacggctgtatattactgtgcgcgctggagttggagtgatggttactacgtttactttgactactggggccaaggcactacggtcaccgtctcctcaggtggtggtggttctggcggcggcggctccggtggtggtggttctgacatcgtgatgacacagtctccagactccctgactgtgtctctgggcgagaggaccaccatcaactgcaagtccagccagagtgttttagacagctccaagaataagaactccttagcttggtaccagcagaaaccaggacagcctcctaaattactcctttcctgggcatctacgcgggaatccgggatccctgaccgattcagtggcagcgggtctgggacagatttcactctcactattgacagcctgcagcctgaagattctgcaacttactattgtcaacagtctgcccacttcccgatcacctttggccaagggacacgactggagattaaatccggaggtggtggctccgaggtgcagctggtcgagtctggaggaggattggtgcagcctggagggtcattgaaactctcatgtgcagcctctggattcaccttcaataagtacgccatgaactgggtccgccaggctccaggaaagggtttggaatgggttgctcgcataagaagtaaatataataattatgcaacatattatgccgattcagtgaaagacaggttcaccatctccagagatgattcaaaaaacactgcctatctacaaatgaacaacttgaaaactgaggacactgccgtgtactactgtgtgagacatgggaacttcggtaatagctacatatcctactgggcttactggggccaagggactctggtcaccgtctcctcaggtggtggtggttctggcggcggcggctccggtggtggtggttctcagactgttgtgactcaggaaccttcactcaccgtatcacctggtggaacagtcacactcacttgtggctcctcgactggggctgttacatctggctactacccaaactgggtccaacaaaaaccaggtcaggcaccccgtggtctaataggtgggactaagttcctcgcccccggtactcctgccagattctcaggctccctgcttggaggcaaggctgccctcaccctctcaggggtacagccagaggatgaggcagaatattactgtgctctatggtacagcaaccgctgggtgttcggtggaggaaccaaactgactgtccta

SEQ ID NO: 277 - protein, 505 aa, synthetic construct
  REGION 1..505: note = CD33 AH11 HL x F12Q HL
QVQLVQSGAEVKKPGESVKVSCKASGYTFTNYGMNWVKQAPGQGLKWMGWINTYTGEPTYADDFKGRVTMTSDTSTSTAYMEISSLRSDDTAVYYCARWSWSDGYYVYFDYWGQGTTVTVSSGGGGSGGGGSGGGGSDIVMTQSPDSLTVSLGERTTINCKSSQSVLDSSKNKNSLAWYQQKPGQPPKLLLSWASTRESGIPDRFSGSGSGTDFTLTIDSLQPEDSATYYCQQSAHFPITFGQGTRLEIKSGGGGSEVQLVESGGGLVQPGGSLKLSCAASGFTFNSYAMNWVRQAPGKGLEWVARIRSKYNNYATYYADSVKGRFTISRDDSKNTAYLQMNNLKTEDTAVYYCVRHGNFGNSYVSWWAYWGQGTLVTVSSGGGGSGGGGSGGGGSQTVVTQEPSLTVSPGGTVTLTCGSSTGAVTSGNYPNWVQQKPGQAPRGLIGGTKFLAPGTPARFSGSLLGGKAALTLSGVQPEDEAEYYCVLWYSNRWVFGGGTKLTVL

SEQ ID NO: 278 - DNA, 1515 bp, synthetic construct
  misc_feature 1..1515: note = CD33 AH11 HL x F12Q HL
  source 1..1515: mol_type = other DNA
caggtgcagctggtgcagtctggagctgaggtgaagaagcctggagagtcagtcaaggtctcctgcaaggctagcgggtataccttcacaaactatggaatgaactgggtgaagcaggctccaggacagggtttaaagtggatgggctggataaacacctacactggagagccaacatatgctgatgacttcaagggacgggttaccatgacttcggatacctctaccagcactgcctatatggaaatcagcagcctcagaagtgatgacacggctgtatattactgtgcgcgctggagttggagtgatggttactacgtttactttgactactggggccaaggcactacggtcaccgtctcctcaggtggtggtggttctggcggcggcggctccggtggtggtggttctgacatcgtgatgacacagtctccagactccctgactgtgtctctgggcgagaggaccaccatcaactgcaagtccagccagagtgttttagacagctccaagaataagaactccttagcttggtaccagcagaaaccaggacagcctcctaaattactcctttcctgggcatctacgcgggaatccgggatccctgaccgattcagtggcagcgggtctgggacagatttcactctcactattgacagcctgcagcctgaagattctgcaacttactattgtcaacagtctgcccacttcccgatcacctttggccaagggacacgactggagattaaatccggaggtggtggctccgaggtgcagctggtcgagtctggaggaggattggtgcagcctggagggtcattgaaactctcatgtgcagcctctggattcaccttcaatagctacgccatgaactgggtccgccaggctccaggaaagggtttggaatgggttgctcgcataagaagtaaatataataattatgcaacatattatgccgattcagtgaaaggcaggttcaccatctccagagatgattcaaaaaacactgcctatctacaaatgaacaacttgaaaactgaggacactgccgtgtactactgtgtgagacatgggaacttcggtaatagctacgtttcctggtgggcttactggggccaagggactctggtcaccgtctcctcaggtggtggtggttctggcggcggcggctccggtggtggtggttctcagactgttgtgactcaggaaccttcactcaccgtatcacctggtggaacagtcacactcacttgtggctcctcgactggggctgttacatctggcaactacccaaactgggtccaacaaaaaccaggtcaggcaccccgtggtctaataggtgggactaagttcctcgcccccggtactcctgccagattctcaggctccctgcttggaggcaaggctgccctcaccctctcaggggtacagccagaggatgaggcagaatattactgtgttctatggtacagcaaccgctgggtgttcggtggaggaaccaaactgactgtccta

SEQ ID NO: 279 - protein, 505 aa, synthetic construct
  REGION 1..505: note = CD33 AH11 HL x I2C HL
QVQLVQSGAEVKKPGESVKVSCKASGYTFTNYGMNWVKQAPGQGLKWMGWINTYTGEPTYADDFKGRVTMTSDTSTSTAYMEISSLRSDDTAVYYCARWSWSDGYYVYFDYWGQGTTVTVSSGGGGSGGGGSGGGGSDIVMTQSPDSLTVSLGERTTINCKSSQSVLDSSKNKNSLAWYQQKPGQPPKLLLSWASTRESGIPDRFSGSGSGTDFTLTIDSLQPEDSATYYCQQSAHFPITFGQGTRLEIKSGGGGSEVQLVESGGGLVQPGGSLKLSCAASGFTFNKYAMNWVRQAPGKGLEWVARIRSKYNNYATYYADSVKDRFTISRDDSKNTAYLQMNNLKTEDTAVYYCVRHGNFGNSYISYWAYWGQGTLVTVSSGGGGSGGGGSGGGGSQTVVTQEPSLTVSPGGTVTLTCGSSTGAVTSGNYPNWVQQKPGQAPRGLIGGTKFLAPGTPARFSGSLLGGKAALTLSGVQPEDEAEYYCVLWYSNRWVFGGGTKLTVL

SEQ ID NO: 280 - DNA, 1515 bp, synthetic construct
  misc_feature 1..1515: note = CD33 AH11 HL x I2C HL
  source 1..1515: mol_type = other DNA
caggtgcagctggtgcagtctggagctgaggtgaagaagcctggagagtcagtcaaggtctcctgcaaggctagcgggtataccttcacaaactatggaatgaactgggtgaagcaggctccaggacagggtttaaagtggatgggctggataaacacctacactggagagccaacatatgctgatgacttcaagggacgggttaccatgacttcggatacctctaccagcactgcctatatggaaatcagcagcctcagaagtgatgacacggctgtatattactgtgcgcgctggagttggagtgatggttactacgtttactttgactactggggccaaggcactacggtcaccgtctcctcaggtggtggtggttctggcggcggcggctccggtggtggtggttctgacatcgtgatgacacagtctccagactccctgactgtgtctctgggcgagaggaccaccatcaactgcaagtccagccagagtgttttagacagctccaagaataagaactccttagcttggtaccagcagaaaccaggacagcctcctaaattactcctttcctgggcatctacgcgggaatccgggatccctgaccgattcagtggcagcgggtctgggacagatttcactctcactattgacagcctgcagcctgaagattctgcaacttactattgtcaacagtctgcccacttcccgatcacctttggccaagggacacgactggagattaaatccggaggtggtggctccgaggtgcagctggtcgagtctggaggaggattggtgcagcctggagggtcattgaaactctcatgtgcagcctctggattcaccttcaataagtacgccatgaactgggtccgccaggctccaggaaagggtttggaatgggttgctcgcataagaagtaaatataataattatgcaacatattatgccgattcagtgaaagacaggttcaccatctccagagatgattcaaaaaacactgcctatctacaaatgaacaacttgaaaactgaggacactgccgtgtactactgtgtgagacatgggaacttcggtaatagctacatatcctactgggcttactggggccaagggactctggtcaccgtctcctcaggtggtggtggttctggcggcggcggctccggtggtggtggttctcagactgttgtgactcaggaaccttcactcaccgtatcacctggtggaacagtcacactcacttgtggctcctcgactggggctgttacatctggcaactacccaaactgggtccaacaaaaaccaggtcaggcaccccgtggtctaataggtgggactaagttcctcgcccccggtactcctgccagattctcaggctccctgcttggaggcaaggctgccctcaccctctcaggggtacagccagaggatgaggcagaatattactgtgttctatggtacagcaaccgctgggtgttcggtggaggaaccaaactgactgtccta

SEQ ID NO: 281 - protein, 505 aa, synthetic construct
  REGION 1..505: note = CD33 B3 HL x H2C HL
QVQLVQSGAEVKKPGESVKVSCKASGYTFTNYGMNWVKQAPGQGLEWMGWINTYTGETNYADKFQGRVTFTSDTSTSTAYMELRNLKSDDTAVYYCARWSWSDGYYVYFDYWGQGTTVTVSSGGGGSGGGGSGGGGSDIVMTQSPDSMTVSLGERTTINCKSSQSVLDSSTNKNSLAWYQQKPGQPPKLLLSWASTRESGIPDRFSGSGSGTDFTLTIDSLQPEDSATYYCQQSAHFPITFGQGTRLDIKSGGGGSEVQLVESGGGLVQPGGSLKLSCAASGFTFNKYAMNWVRQAPGKGLEWVARIRSKYNNYATYYADSVKDRFTISRDDSKNTAYLQMNNLKTEDTAVYYCVRHGNFGNSYISYWAYWGQGTLVTVSSGGGGSGGGGSGGGGSQTVVTQEPSLTVSPGGTVTLTCGSSTGAVTSGYYPNWVQQKPGQAPRGLIGGTKFLAPGTPARFSGSLLGGKAALTLSGVQPEDEAEYYCALWYSNRWVFGGGTKLTVL

SEQ ID NO: 282 - DNA, 1515 bp, synthetic construct
  misc_feature 1..1515: note = CD33 B3 HL x H2C HL
  source 1..1515: mol_type = other DNA
caggtgcagctggtgcagtctggagctgaggtgaagaagcctggagagtcagtcaaggtctcctgcaaggctagcgggtataccttcacaaactatggaatgaactgggtgaagcaggctccaggacagggtttagagtggatgggctggataaacacctacactggagagacaaactatgctgataagttccagggacgcgttaccttcacttcggatacctctaccagcactgcctatatggaactccgcaacctcaaaagtgatgacacggctgtatattactgtgcgcgctggagttggagtgatggttactacgtttactttgactactggggccaaggcactacggtcaccgtctcctcaggtggtggtggttctggcggcggcggctccggtggtggtggttctgacatcgtgatgacacagtctccagactccatgactgtgtctctgggcgagaggaccaccatcaactgcaagtccagccagagtgttttagacagctccacgaataagaactccttagcttggtaccagcagaaaccaggacagcctcctaaattactcctttcctgggcatctacgcgggaatccgggatccctgaccgattcagtggcagcgggtctgggacagatttcactctcactattgacagcctgcagcctgaagattctgcaacttactattgtcaacagtctgcccacttcccgatcacctttggccaagggacacgactggacattaaatccggaggtggtggctccgaggtgcagctggtcgagtctggaggaggattggtgcagcctggagggtcattgaaactctcatgtgcagcctctggattcaccttcaataagtacgccatgaactgggtccgccaggctccaggaaagggtttggaatgggttgctcgcataagaagtaaatataataattatgcaacatattatgccgattcagtgaaagacaggttcaccatctccagagatgattcaaaaaacactgcctatctacaaatgaacaacttgaaaactgaggacactgccgtgtactactgtgtgagacatgggaacttcggtaatagctacatatcctactgggcttactggggccaagggactctggtcaccgtctcctcaggtggtggtggttctggcggcggcggctccggtggtggtggttctcagactgttgtgactcaggaaccttcactcaccgtatcacctggtggaacagtcacactcacttgtggctcctcgactggggctgttacatctggctactacccaaactgggtccaacaaaaaccaggtcaggcaccccgtggtctaataggtgggactaagttcctcgcccccggtactcctgccagattctcaggctccctgcttggaggcaaggctgccctcaccctctcaggggtacagccagaggatgaggcagaatattactgtgctctatggtacagcaaccgctgggtgttcggtggaggaaccaaactgactgtccta

SEQ ID NO: 283 - protein, 505 aa, synthetic construct
  REGION 1..505: note = CD33 B3 HL x F12Q HL
QVQLVQSGAEVKKPGESVKVSCKASGYTFTNYGMNWVKQAPGQGLEWMGWINTYTGETNYADKFQGRVTFTSDTSTSTAYMELRNLKSDDTAVYYCARWSWSDGYYVYFDYWGQGTTVTVSSGGGGSGGGGSGGGGSDIVMTQSPDSMTVSLGERTTINCKSSQSVLDSSTNKNSLAWYQQKPGQPPKLLLSWASTRESGIPDRFSGSGSGTDFTLTIDSLQPEDSATYYCQQSAHFPITFGQGTRLDIKSGGGGSEVQLVESGGGLVQPGGSLKLSCAASGFTFNSYAMNWVRQAPGKGLEWVARIRSKYNNYATYYADSVKGRFTISRDDSKNTAYLQMNNLKTEDTAVYYCVRHGNFGNSYVSWWAYWGQGTLVTVSSGGGGSGGGGSGGGGSQTVVTQEPSLTVSPGGTVTLTCGSSTGAVTSGNYPNWVQQKPGQAPRGLIGGTKFLAPGTPARFSGSLLGGKAALTLSGVQPEDEAEYYCVLWYSNRWVFGGGTKLTVL

SEQ ID NO: 284 - DNA, 1515 bp, synthetic construct
  misc_feature 1..1515: note = CD33 B3 HL x F12Q HL
  source 1..1515: mol_type = other DNA
caggtgcagctggtgcagtctggagctgaggtgaagaagcctggagagtcagtcaaggtctcctgcaaggctagcgggtataccttcacaaactatggaatgaactgggtgaagcaggctccaggacagggtttagagtggatgggctggataaacacctacactggagagacaaactatgctgataagttccagggacgcgttaccttcacttcggatacctctaccagcactgcctatatggaactccgcaacctcaaaagtgatgacacggctgtatattactgtgcgcgctggagttggagtgatggttactacgtttactttgactactggggccaaggcactacggtcaccgtctcctcaggtggtggtggttctggcggcggcggctccggtggtggtggttctgacatcgtgatgacacagtctccagactccatgactgtgtctctgggcgagaggaccaccatcaactgcaagtccagccagagtgttttagacagctccacgaataagaactccttagcttggtaccagcagaaaccaggacagcctcctaaattactcctttcctgggcatctacgcgggaatccgggatccctgaccgattcagtggcagcgggtctgggacagatttcactctcactattgacagcctgcagcctgaagattctgcaacttactattgtcaacagtctgcccacttcccgatcacctttggccaagggacacgactggacattaaatccggaggtggtggctccgaggtgcagctggtcgagtctggaggaggattggtgcagcctggagggtcattgaaactctcatgtgcagcctctggattcaccttcaatagctacgccatgaactgggtccgccaggctccaggaaagggtttggaatgggttgctcgcataagaagtaaatataataattatgcaacatattatgccgattcagtgaaaggcaggttcaccatctccagagatgattcaaaaaacactgcctatctacaaatgaacaacttgaaaactgaggacactgccgtgtactactgtgtgagacatgggaacttcggtaatagctacgtttcctggtgggcttactggggccaagggactctggtcaccgtctcctcaggtggtggtggttctggcggcggcggctccggtggtggtggttctcagactgttgtgactcaggaaccttcactcaccgtatcacctggtggaacagtcacactcacttgtggctcctcgactggggctgttacatctggcaactacccaaactgggtccaacaaaaaccaggtcaggcaccccgtggtctaataggtgggactaagttcctcgcccccggtactcctgccagattctcaggctccctgcttggaggcaaggctgccctcaccctctcaggggtacagccagaggatgaggcagaatattactgtgttctatggtacagcaaccgctgggtgttcggtggaggaaccaaactgactgtccta

SEQ ID NO: 285 - protein, 505 aa, synthetic construct
  REGION 1..505: note = CD33 B3 HL x I2C HL
QVQLVQSGAEVKKPGESVKVSCKASGYTFTNYGMNWVKQAPGQGLEWMGWINTYTGETNYADKFQGRVTFTSDTSTSTAYMELRNLKSDDTAVYYCARWSWSDGYYVYFDYWGQGTTVTVSSGGGGSGGGGSGGGGSDIVMTQSPDSMTVSLGERTTINCKSSQSVLDSSTNKNSLAWYQQKPGQPPKLLLSWASTRESGIPDRFSGSGSGTDFTLTIDSLQPEDSATYYCQQSAHFPITFGQGTRLDIKSGGGGSEVQLVESGGGLVQPGGSLKLSCAASGFTFNKYAMNWVRQAPGKGLEWVARIRSKYNNYATYYADSVKDRFTISRDDSKNTAYLQMNNLKTEDTAVYYCVRHGNFGNSYISYWAYWGQGTLVTVSSGGGGSGGGGSGGGGSQTVVTQEPSLTVSPGGTVTLTCGSSTGAVTSGNYPNWVQQKPGQAPRGLIGGTKFLAPGTPARFSGSLLGGKAALTLSGVQPEDEAEYYCVLWYSNRWVFGGGTKLTVL

SEQ ID NO: 286 - DNA, 1515 bp, synthetic construct
  misc_feature 1..1515: note = CD33 B3 HL x I2C HL
  source 1..1515: mol_type = other DNA
caggtgcagctggtgcagtctggagctgaggtgaagaagcctggagagtcagtcaaggtctcctgcaaggctagcgggtataccttcacaaactatggaatgaactgggtgaagcaggctccaggacagggtttagagtggatgggctggataaacacctacactggagagacaaactatgctgataagttccagggacgcgttaccttcacttcggatacctctaccagcactgcctatatggaactccgcaacctcaaaagtgatgacacggctgtatattactgtgcgcgctggagttggagtgatggttactacgtttactttgactactggggccaaggcactacggtcaccgtctcctcaggtggtggtggttctggcggcggcggctccggtggtggtggttctgacatcgtgatgacacagtctccagactccatgactgtgtctctgggcgagaggaccaccatcaactgcaagtccagccagagtgttttagacagctccacgaataagaactccttagcttggtaccagcagaaaccaggacagcctcctaaattactcctttcctgggcatctacgcgggaatccgggatccctgaccgattcagtggcagcgggtctgggacagatttcactctcactattgacagcctgcagcctgaagattctgcaacttactattgtcaacagtctgcccacttcccgatcacctttggccaagggacacgactggacattaaatccggaggtggtggctccgaggtgcagctggtcgagtctggaggaggattggtgcagcctggagggtcattgaaactctcatgtgcagcctctggattcaccttcaataagtacgccatgaactgggtccgccaggctccaggaaagggtttggaatgggttgctcgcataagaagtaaatataataattatgcaacatattatgccgattcagtgaaagacaggttcaccatctccagagatgattcaaaaaacactgcctatctacaaatgaacaacttgaaaactgaggacactgccgtgtactactgtgtgagacatgggaacttcggtaatagctacatatcctactgggcttactggggccaagggactctggtcaccgtctcctcaggtggtggtggttctggcggcggcggctccggtggtggtggttctcagactgttgtgactcaggaaccttcactcaccgtatcacctggtggaacagtcacactcacttgtggctcctcgactggggctgttacatctggcaactacccaaactgggtccaacaaaaaccaggtcaggcaccccgtggtctaataggtgggactaagttcctcgcccccggtactcctgccagattctcaggctccctgcttggaggcaaggctgccctcaccctctcaggggtacagccagaggatgaggcagaatattactgtgttctatggtacagcaaccgctgggtgttcggtggaggaaccaaactgactgtccta

SEQ ID NO: 287 - protein, 505 aa, synthetic construct
  REGION 1..505: note = CD33 F2 HL x H2C HL
QVQLVQSGAEVKKPGESVKVSCKASGYTFTNYGMNWVKQAPGQGLEWMGWINTYTGETNYADKFQGRVTFTSDTSTSTAYMELRNLKSDDTAVYYCARWSWSDGYYVYFDYWGQGTTVTVSSGGGGSGGGGSGGGGSDIVMTQSPDSLSVSLGERTTINCKSSQSVLDSSTNKNSLAWYQQKPGQPPKLLLSWASTRESGIPDRFSGSGSGTDFTLTIDSLQPEDSATYYCQQSAHFPITFGQGTRLEIKSGGGGSEVQLVESGGGLVQPGGSLKLSCAASGFTFNKYAMNWVRQAPGKGLEWVARIRSKYNNYATYYADSVKDRFTISRDDSKNTAYLQMNNLKTEDTAVYYCVRHGNFGNSYISYWAYWGQGTLVTVSSGGGGSGGGGSGGGGSQTVVTQEPSLTVSPGGTVTLTCGSSTGAVTSGYYPNWVQQKPGQAPRGLIGGTKFLAPGTPARFSGSLLGGKAALTLSGVQPEDEAEYYCALWYSNRWVFGGGTKLTVL

SEQ ID NO: 288 - DNA, 1515 bp, synthetic construct
  misc_feature 1..1515: note = CD33 F2 HL x H2C HL
  source 1..1515: mol_type = other DNA
caggtgcagctggtgcagtctggagctgaggtgaagaagcctggagagtcagtcaaggtctcctgcaaggctagcgggtataccttcacaaactatggaatgaactgggtgaagcaggctccaggacagggtttagagtggatgggctggataaacacctacactggagagacaaactatgctgataagttccagggacgcgttaccttcacttcggatacctctaccagcactgcctatatggaactccgcaacctcaaaagtgatgacacggctgtatattactgtgcgcgctggagttggagtgatggttactacgtttactttgactactggggccaaggcactacggtcaccgtctcctcaggtggtggtggttctggcggcggcggctccggtggtggtggttctgacatcgtgatgacacagtctccagactccctgtctgtgtctctgggcgagaggaccaccatcaactgcaagtccagccagagtgttttagacagctccacgaataagaactccttagcttggtaccagcagaaaccaggacagcctcctaaattactcctttcctgggcatctacgcgggaatccgggatccctgaccgattcagtggcagcgggtctgggacagatttcactctcactattgacagcctgcagcctgaagattctgcaacttactattgtcaacagtctgcccacttcccgatcacctttggccaagggacacgactggagattaaatccggaggtggtggctccgaggtgcagctggtcgagtctggaggaggattggtgcagcctggagggtcattgaaactctcatgtgcagcctctggattcaccttcaataagtacgccatgaactgggtccgccaggctccaggaaagggtttggaatgggttgctcgcataagaagtaaatataataattatgcaacatattatgccgattcagtgaaagacaggttcaccatctccagagatgattcaaaaaacactgcctatctacaaatgaacaacttgaaaactgaggacactgccgtgtactactgtgtgagacatgggaacttcggtaatagctacatatcctactgggcttactggggccaagggactctggtcaccgtctcctcaggtggtggtggttctggcggcggcggctccggtggtggtggttctcagactgttgtgactcaggaaccttcactcaccgtatcacctggtggaacagtcacactcacttgtggctcctcgactggggctgttacatctggctactacccaaactgggtccaacaaaaaccaggtcaggcaccccgtggtctaataggtgggactaagttcctcgcccccggtactcctgccagattctcaggctccctgcttggaggcaaggctgccctcaccctctcaggggtacagccagaggatgaggcagaatattactgtgctctatggtacagcaaccgctgggtgttcggtggaggaaccaaactgactgtccta

SEQ ID NO: 289 - protein, 505 aa, synthetic construct
  REGION 1..505: note = CD33 F2 HL x F12Q HL
QVQLVQSGAEVKKPGESVKVSCKASGYTFTNYGMNWVKQAPGQGLEWMGWINTYTGETNYADKFQGRVTFTSDTSTSTAYMELRNLKSDDTAVYYCARWSWSDGYYVYFDYWGQGTTVTVSSGGGGSGGGGSGGGGSDIVMTQSPDSLSVSLGERTTINCKSSQSVLDSSTNKNSLAWYQQKPGQPPKLLLSWASTRESGIPDRFSGSGSGTDFTLTIDSLQPEDSATYYCQQSAHFPITFGQGTRLEIKSGGGGSEVQLVESGGGLVQPGGSLKLSCAASGFTFNSYAMNWVRQAPGKGLEWVARIRSKYNNYATYYADSVKGRFTISRDDSKNTAYLQMNNLKTEDTAVYYCVRHGNFGNSYVSWWAYWGQGTLVTVSSGGGGSGGGGSGGGGSQTVVTQEPSLTVSPGGTVTLTCGSSTGAVTSGNYPNWVQQKPGQAPRGLIGGTKFLAPGTPARFSGSLLGGKAALTLSGVQPEDEAEYYCVLWYSNRWVFGGGTKLTVL

SEQ ID NO: 290 - DNA, 1515 bp, synthetic construct
  misc_feature 1..1515: note = CD33 F2 HL x F12Q HL
  source 1..1515: mol_type = other DNA
caggtgcagctggtgcagtctggagctgaggtgaagaagcctggagagtcagtcaaggtctcctgcaaggctagcgggtataccttcacaaactatggaatgaactgggtgaagcaggctccaggacagggtttagagtggatgggctggataaacacctacactggagagacaaactatgctgataagttccagggacgcgttaccttcacttcggatacctctaccagcactgcctatatggaactccgcaacctcaaaagtgatgacacggctgtatattactgtgcgcgctggagttggagtgatggttactacgtttactttgactactggggccaaggcactacggtcaccgtctcctcaggtggtggtggttctggcggcggcggctccggtggtggtggttctgacatcgtgatgacacagtctccagactccctgtctgtgtctctgggcgagaggaccaccatcaactgcaagtccagccagagtgttttagacagctccacgaataagaactccttagcttggtaccagcagaaaccaggacagcctcctaaattactcctttcctgggcatctacgcgggaatccgggatccctgaccgattcagtggcagcgggtctgggacagatttcactctcactattgacagcctgcagcctgaagattctgcaacttactattgtcaacagtctgcccacttcccgatcacctttggccaagggacacgactggagattaaatccggaggtggtggctccgaggtgcagctggtcgagtctggaggaggattggtgcagcctggagggtcattgaaactctcatgtgcagcctctggattcaccttcaatagctacgccatgaactgggtccgccaggctccaggaaagggtttggaatgggttgctcgcataagaagtaaatataataattatgcaacatattatgccgattcagtgaaaggcaggttcaccatctccagagatgattcaaaaaacactgcctatctacaaatgaacaacttgaaaactgaggacactgccgtgtactactgtgtgagacatgggaacttcggtaatagctacgtttcctggtgggcttactggggccaagggactctggtcaccgtctcctcaggtggtggtggttctggcggcggcggctccggtggtggtggttctcagactgttgtgactcaggaaccttcactcaccgtatcacctggtggaacagtcacactcacttgtggctcctcgactggggctgttacatctggcaactacccaaactgggtccaacaaaaaccaggtcaggcaccccgtggtctaataggtgggactaagttcctcgcccccggtactcctgccagattctcaggctccctgcttggaggcaaggctgccctcaccctctcaggggtacagccagaggatgaggcagaatattactgtgttctatggtacagcaaccgctgggtgttcggtggaggaaccaaactgactgtccta

SEQ ID NO: 291 - protein, 505 aa, synthetic construct
  REGION 1..505: note = CD33 F2 HL x I2C HL
QVQLVQSGAEVKKPGESVKVSCKASGYTFTNYGMNWVKQAPGQGLEWMGWINTYTGETNYADKFQGRVTFTSDTSTSTAYMELRNLKSDDTAVYYCARWSWSDGYYVYFDYWGQGTTVTVSSGGGGSGGGGSGGGGSDIVMTQSPDSLSVSLGERTTINCKSSQSVLDSSTNKNSLAWYQQKPGQPPKLLLSWASTRESGIPDRFSGSGSGTDFTLTIDSLQPEDSATYYCQQSAHFPITFGQGTRLEIKSGGGGSEVQLVESGGGLVQPGGSLKLSCAASGFTFNKYAMNWVRQAPGKGLEWVARIRSKYNNYATYYADSVKDRFTISRDDSKNTAYLQMNNLKTEDTAVYYCVRHGNFGNSYISYWAYWGQGTLVTVSSGGGGSGGGGSGGGGSQTVVTQEPSLTVSPGGTVTLTCGSSTGAVTSGNYPNWVQQKPGQAPRGLIGGTKFLAPGTPARFSGSLLGGKAALTLSGVQPEDEAEYYCVLWYSNRWVFGGGTKLTVL

SEQ ID NO: 292 - DNA, 1515 bp, synthetic construct
  misc_feature 1..1515: note = CD33 F2 HL x I2C HL
  source 1..1515: mol_type = other DNA
caggtgcagctggtgcagtctggagctgaggtgaagaagcctggagagtcagtcaaggtctcctgcaaggctagcgggtataccttcacaaactatggaatgaactgggtgaagcaggctccaggacagggtttagagtggatgggctggataaacacctacactggagagacaaactatgctgataagttccagggacgcgttaccttcacttcggatacctctaccagcactgcctatatggaactccgcaacctcaaaagtgatgacacggctgtatattactgtgcgcgctggagttggagtgatggttactacgtttactttgactactggggccaaggcactacggtcaccgtctcctcaggtggtggtggttctggcggcggcggctccggtggtggtggttctgacatcgtgatgacacagtctccagactccctgtctgtgtctctgggcgagaggaccaccatcaactgcaagtccagccagagtgttttagacagctccacgaataagaactccttagcttggtaccagcagaaaccaggacagcctcctaaattactcctttcctgggcatctacgcgggaatccgggatccctgaccgattcagtggcagcgggtctgggacagatttcactctcactattgacagcctgcagcctgaagattctgcaacttactattgtcaacagtctgcccacttcccgatcacctttggccaagggacacgactggagattaaatccggaggtggtggctccgaggtgcagctggtcgagtctggaggaggattggtgcagcctggagggtcattgaaactctcatgtgcagcctctggattcaccttcaataagtacgccatgaactgggtccgccaggctccaggaaagggtttggaatgggttgctcgcataagaagtaaatataataattatgcaacatattatgccgattcagtgaaagacaggttcaccatctccagagatgattcaaaaaacactgcctatctacaaatgaacaacttgaaaactgaggacactgccgtgtactactgtgtgagacatgggaacttcggtaatagctacatatcctactgggcttactggggccaagggactctggtcaccgtctcctcaggtggtggtggttctggcggcggcggctccggtggtggtggttctcagactgttgtgactcaggaaccttcactcaccgtatcacctggtggaacagtcacactcacttgtggctcctcgactggggctgttacatctggcaactacccaaactgggtccaacaaaaaccaggtcaggcaccccgtggtctaataggtgggactaagttcctcgcccccggtactcctgccagattctcaggctccctgcttggaggcaaggctgccctcaccctctcaggggtacagccagaggatgaggcagaatattactgtgttctatggtacagcaaccgctgggtgttcggtggaggaaccaaactgactgtccta

SEQ ID NO: 293 - protein, 505 aa, synthetic construct
  REGION 1..505: note = CD33 B10 HL x H2C HL
QVQLVQSGAEVKKPGESVKVSCKASGYTFTNYGMNWVKQAPGQGLEWMGWINTYTGEPTYADKFQGRVTMTTDTSTSTAYMEIRNLRSDDTAVYYCARWSWSDGYYVYFDYWGQGTTVTVSSGGGGSGGGGSGGGGSDIVMTQSPDSLTVSLGERTTINCKSSQSVLDSSNNKNSLAWYQQKPGQPPKLLLSWASTRESGIPDRFSGSGSGTDFTLTIDGLQPEDSATYYCQQSAHFPITFGQGTRLEIKSGGGGSEVQLVESGGGLVQPGGSLKLSCAASGFTFNKYAMNWVRQAPGKGLEWVARIRSKYNNYATYYADSVKDRFTISRDDSKNTAYLQMNNLKTEDTAVYYCVRHGNFGNSYISYWAYWGQGTLVTVSSGGGGSGGGGSGGGGSQTVVTQEPSLTVSPGGTVTLTCGSSTGAVTSGYYPNWVQQKPGQAPRGLIGGTKFLAPGTPARFSGSLLGGKAALTLSGVQPEDEAEYYCALWYSNRWVFGGGTKLTVL

SEQ ID NO: 294 - DNA, 1515 bp, synthetic construct
  misc_feature 1..1515: note = CD33 B10 HL x H2C HL
  source 1..1515: mol_type = other DNA
caggtgcagctggtgcagtctggagctgaggtgaagaagcctggtgagtcagtcaaggtctcctgcaaggctagcgggtataccttcacaaactatggaatgaactgggtgaagcaggctccaggacagggtttagagtggatgggctggataaacacctacactggagagccaacctatgctgataagttccagggacgcgttaccatgactacggatacctctaccagcactgcctatatggaaatccgcaacctcagaagtgatgacacggctgtatattactgtgcgcgctggagttggagtgatggttactacgtttactttgactactggggccaaggcactacggtcaccgtctcctcaggtggtggtggttctggcggcggcggctccggtggtggtggttctgacatcgtgatgacacagtctccagactccctgactgtgtctctgggcgagaggaccaccatcaactgcaagtccagccagagtgttttagacagctccaacaataagaactccttagcttggtaccagcagaaaccaggacagcctcctaaattactcctttcctgggcatctacgcgggaatccgggatccctgaccgattcagtggcagcggttctgggacagatttcactctcactattgacggcctgcagcctgaagattctgcaacttactattgtcaacagtctgcccacttcccgatcacctttggccaagggacacgactggagattaaatccggaggtggtggctccgaggtgcagctggtcgagtctggaggaggattggtgcagcctggagggtcattgaaactctcatgtgcagcctctggattcaccttcaataagtacgccatgaactgggtccgccaggctccaggaaagggtttggaatgggttgctcgcataagaagtaaatataataattatgcaacatattatgccgattcagtgaaagacaggttcaccatctccagagatgattcaaaaaacactgcctatctacaaatgaacaacttgaaaactgaggacactgccgtgtactactgtgtgagacatgggaacttcggtaatagctacatatcctactgggcttactggggccaagggactctggtcaccgtctcctcaggtggtggtggttctggcggcggcggctccggtggtggtggttctcagactgttgtgactcaggaaccttcactcaccgtatcacctggtggaacagtcacactcacttgtggctcctcgactggggctgttacatctggctactacccaaactgggtccaacaaaaaccaggtcaggcaccccgtggtctaataggtgggactaagttcctcgcccccggtactcctgccagattctcaggctccctgcttggaggcaaggctgccctcaccctctcaggggtacagccagaggatgaggcagaatattactgtgctctatggtacagcaaccgctgggtgttcggtggaggaaccaaactgactgtccta

SEQ ID NO: 295 - protein, 505 aa, synthetic construct
  REGION 1..505: note = CD33 B10 HL x F12Q HL
QVQLVQSGAEVKKPGESVKVSCKASGYTFTNYGMNWVKQAPGQGLEWMGWINTYTGEPTYADKFQGRVTMTTDTSTSTAYMEIRNLRSDDTAVYYCARWSWSDGYYVYFDYWGQGTTVTVSSGGGGSGGGGSGGGGSDIVMTQSPDSLTVSLGERTTINCKSSQSVLDSSNNKNSLAWYQQKPGQPPKLLLSWASTRESGIPDRFSGSGSGTDFTLTIDGLQPEDSATYYCQQSAHFPITFGQGTRLEIKSGGGGSEVQLVESGGGLVQPGGSLKLSCAASGFTFNSYAMNWVRQAPGKGLEWVARIRSKYNNYATYYADSVKGRFTISRDDSKNTAYLQMNNLKTEDTAVYYCVRHGNFGNSYVSWWAYWGQGTLVTVSSGGGGSGGGGSGGGGSQTVVTQEPSLTVSPGGTVTLTCGSSTGAVTSGNYPNWVQQKPGQAPRGLIGGTKFLAPGTPARFSGSLLGGKAALTLSGVQPEDEAEYYCVLWYSNRWVFGGGTKLTVL

SEQ ID NO: 296 - DNA, 1515 bp, synthetic construct
  misc_feature 1..1515: note = CD33 B10 HL x F12Q HL
  source 1..1515: mol_type = other DNA
caggtgcagctggtgcagtctggagctgaggtgaagaagcctggtgagtcagtcaaggtctcctgcaaggctagcgggtataccttcacaaactatggaatgaactgggtgaagcaggctccaggacagggtttagagtggatgggctggataaacacctacactggagagccaacctatgctgataagttccagggacgcgttaccatgactacggatacctctaccagcactgcctatatggaaatccgcaacctcagaagtgatgacacggctgtatattactgtgcgcgctggagttggagtgatggttactacgtttactttgactactggggccaaggcactacggtcaccgtctcctcaggtggtggtggttctggcggcggcggctccggtggtggtggttctgacatcgtgatgacacagtctccagactccctgactgtgtctctgggcgagaggaccaccatcaactgcaagtccagccagagtgttttagacagctccaacaataagaactccttagcttggtaccagcagaaaccaggacagcctcctaaattactcctttcctgggcatctacgcgggaatccgggatccctgaccgattcagtggcagcggttctgggacagatttcactctcactattgacggcctgcagcctgaagattctgcaacttactattgtcaacagtctgcccacttcccgatcacctttggccaagggacacgactggagattaaatccggaggtggtggctccgaggtgcagctggtcgagtctggaggaggattggtgcagcctggagggtcattgaaactctcatgtgcagcctctggattcaccttcaatagctacgccatgaactgggtccgccaggctccaggaaagggtttggaatgggttgctcgcataagaagtaaatataataattatgcaacatattatgccgattcagtgaaaggcaggttcaccatctccagagatgattcaaaaaacactgcctatctacaaatgaacaacttgaaaactgaggacactgccgtgtactactgtgtgagacatgggaacttcggtaatagctacgtttcctggtgggcttactggggccaagggactctggtcaccgtctcctcaggtggtggtggttctggcggcggcggctccggtggtggtggttctcagactgttgtgactcaggaaccttcactcaccgtatcacctggtggaacagtcacactcacttgtggctcctcgactggggctgttacatctggcaactacccaaactgggtccaacaaaaaccaggtcaggcaccccgtggtctaataggtgggactaagttcctcgcccccggtactcctgccagattctcaggctccctgcttggaggcaaggctgccctcaccctctcaggggtacagccagaggatgaggcagaatattactgtgttctatggtacagcaaccgctgggtgttcggtggaggaaccaaactgactgtccta

SEQ ID NO: 297 - protein, 505 aa, synthetic construct
  REGION 1..505: note = CD33 B10 HL x I2C HL
QVQLVQSGAEVKKPGESVKVSCKASGYTFTNYGMNWVKQAPGQGLEWMGWINTYTGEPTYADKFQGRVTMTTDTSTSTAYMEIRNLRSDDTAVYYCARWSWSDGYYVYFDYWGQGTTVTVSSGGGGSGGGGSGGGGSDIVMTQSPDSLTVSLGERTTINCKSSQSVLDSSNNKNSLAWYQQKPGQPPKLLLSWASTRESGIPDRFSGSGSGTDFTLTIDGLQPEDSATYYCQQSAHFPITFGQGTRLEIKSGGGGSEVQLVESGGGLVQPGGSLKLSCAASGFTFNKYAMNWVRQAPGKGLEWVARIRSKYNNYATYYADSVKDRFTISRDDSKNTAYLQMNNLKTEDTAVYYCVRHGNFGNSYISYWAYWGQGTLVTVSSGGGGSGGGGSGGGGSQTVVTQEPSLTVSPGGTVTLTCGSSTGAVTSGNYPNWVQQKPGQAPRGLIGGTKFLAPGTPARFSGSLLGGKAALTLSGVQPEDEAEYYCVLWYSNRWVFGGGTKLTVL

SEQ ID NO: 298 - DNA, 1515 bp, synthetic construct
  misc_feature 1..1515: note = CD33 B10 HL x I2C HL
  source 1..1515: mol_type = other DNA
caggtgcagctggtgcagtctggagctgaggtgaagaagcctggtgagtcagtcaaggtctcctgcaaggctagcgggtataccttcacaaactatggaatgaactgggtgaagcaggctccaggacagggtttagagtggatgggctggataaacacctacactggagagccaacctatgctgataagttccagggacgcgttaccatgactacggatacctctaccagcactgcctatatggaaatccgcaacctcagaagtgatgacacggctgtatattactgtgcgcgctggagttggagtgatggttactacgtttactttgactactggggccaaggcactacggtcaccgtctcctcaggtggtggtggttctggcggcggcggctccggtggtggtggttctgacatcgtgatgacacagtctccagactccctgactgtgtctctgggcgagaggaccaccatcaactgcaagtccagccagagtgttttagacagctccaacaataagaactccttagcttggtaccagcagaaaccaggacagcctcctaaattactcctttcctgggcatctacgcgggaatccgggatccctgaccgattcagtggcagcggttctgggacagatttcactctcactattgacggcctgcagcctgaagattctgcaacttactattgtcaacagtctgcccacttcccgatcacctttggccaagggacacgactggagattaaatccggaggtggtggctccgaggtgcagctggtcgagtctggaggaggattggtgcagcctggagggtcattgaaactctcatgtgcagcctctggattcaccttcaataagtacgccatgaactgggtccgccaggctccaggaaagggtttggaatgggttgctcgcataagaagtaaatataataattatgcaacatattatgccgattcagtgaaagacaggttcaccatctccagagatgattcaaaaaacactgcctatctacaaatgaacaacttgaaaactgaggacactgccgtgtactactgtgtgagacatgggaacttcggtaatagctacatatcctactgggcttactggggccaagggactctggtcaccgtctcctcaggtggtggtggttctggcggcggcggctccggtggtggtggttctcagactgttgtgactcaggaaccttcactcaccgtatcacctggtggaacagtcacactcacttgtggctcctcgactggggctgttacatctggcaactacccaaactgggtccaacaaaaaccaggtcaggcaccccgtggtctaataggtgggactaagttcctcgcccccggtactcctgccagattctcaggctccctgcttggaggcaaggctgccctcaccctctcaggggtacagccagaggatgaggcagaatattactgtgttctatggtacagcaaccgctgggtgttcggtggaggaaccaaactgactgtccta

SEQ ID NO: 299 - protein, 505 aa, synthetic construct
  REGION 1..505: note = CD33 E11 HL x H2C HL
QVQLVQSGAEVKKPGESVKVSCKASGYTFTNYGMNWVKQAPGQGLEWMGWINTYTGEPTYADKFQGRVTMTTDTSTSTAYMEIRNLGGDDTAVYYCARWSWSDGYYVYFDYWGQGTSVTVSSGGGGSGGGGSGGGGSDIVMTQSPDSLTVSLGERTTINCKSSQSVLDSSTNKNSLAWYQQKPGQPPKLLLSWASTRESGIPDRFSGSGSGTDFTLTIDSPQPEDSATYYCQQSAHFPITFGQGTRLEIKSGGGGSEVQLVESGGGLVQPGGSLKLSCAASGFTFNKYAMNWVRQAPGKGLEWVARIRSKYNNYATYYADSVKDRFTISRDDSKNTAYLQMNNLKTEDTAVYYCVRHGNFGNSYISYWAYWGQGTLVTVSSGGGGSGGGGSGGGGSQTVVTQEPSLTVSPGGTVTLTCGSSTGAVTSGYYPNWVQQKPGQAPRGLIGGTKFLAPGTPARFSGSLLGGKAALTLSGVQPEDEAEYYCALWYSNRWVFGGGTKLTVL

SEQ ID NO: 300 - DNA, 1515 bp, synthetic construct
  misc_feature 1..1515: note = CD33 E11 HL x H2C HL
  source 1..1515: mol_type = other DNA
caggtgcagctggtgcagtctggagctgaggtgaagaagcctggagagtcagtcaaggtctcctgcaaggctagcgggtataccttcacaaactatggaatgaactgggtgaagcaggctccaggacagggtttagagtggatgggctggataaacacctacactggagagccaacctatgctgataagttccagggacgcgttaccatgactacggatacctctaccagcactgcctatatggaaatccgcaacctcggaggtgatgacacggctgtatattactgtgcgcgctggagttggagtgatggttactacgtttactttgactactggggccaaggcacttcggtcaccgtctcctcaggtggtggtggttctggcggcggcggctccggtggtggtggttctgacatcgtgatgacacagtctccagactccctgactgtgtctctgggcgagaggaccaccatcaactgcaagtccagccagagtgttttagacagctccacgaataagaactccttagcttggtaccagcagaaaccaggacagcctcctaaattactcctttcctgggcatctacgcgggaatccgggatccctgaccgattcagtggcagcgggtctgggacagatttcactctcactattgacagcccgcagcctgaagattctgcaacttactattgtcaacagtctgcccacttcccgatcacctttggccaagggacacgactggagattaaatccggaggtggtggctccgaggtgcagctggtcgagtctggaggaggattggtgcagcctggagggtcattgaaactctcatgtgcagcctctggattcaccttcaataagtacgccatgaactgggtccgccaggctccaggaaagggtttggaatgggttgctcgcataagaagtaaatataataattatgcaacatattatgccgattcagtgaaagacaggttcaccatctccagagatgattcaaaaaacactgcctatctacaaatgaacaacttgaaaactgaggacactgccgtgtactactgtgtgagacatgggaacttcggtaatagctacatatcctactgggcttactggggccaagggactctggtcaccgtctcctcaggtggtggtggttctggcggcggcggctccggtggtggtggttctcagactgttgtgactcaggaaccttcactcaccgtatcacctggtggaacagtcacactcacttgtggctcctcgactggggctgttacatctggctactacccaaactgggtccaacaaaaaccaggtcaggcaccccgtggtctaataggtgggactaagttcctcgcccccggtactcctgccagattctcaggctccctgcttggaggcaaggctgccctcaccctctcaggggtacagccagaggatgaggcagaatattactgtgctctatggtacagcaaccgctgggtgttcggtggaggaaccaaactgactgtccta

SEQ ID NO: 301 - protein, 505 aa, synthetic construct
  REGION 1..505: note = CD33 E11 HL x F12Q HL
QVQLVQSGAEVKKPGESVKVSCKASGYTFTNYGMNWVKQAPGQGLEWMGWINTYTGEPTYADKFQGRVTMTTDTSTSTAYMEIRNLGGDDTAVYYCARWSWSDGYYVYFDYWGQGTSVTVSSGGGGSGGGGSGGGGSDIVMTQSPDSLTVSLGERTTINCKSSQSVLDSSTNKNSLAWYQQKPGQPPKLLLSWASTRESGIPDRFSGSGSGTDFTLTIDSPQPEDSATYYCQQSAHFPITFGQGTRLEIKSGGGGSEVQLVESGGGLVQPGGSLKLSCAASGFTFNSYAMNWVRQAPGKGLEWVARIRSKYNNYATYYADSVKGRFTISRDDSKNTAYLQMNNLKTEDTAVYYCVRHGNFGNSYVSWWAYWGQGTLVTVSSGGGGSGGGGSGGGGSQTVVTQEPSLTVSPGGTVTLTCGSSTGAVTSGNYPNWVQQKPGQAPRGLIGGTKFLAPGTPARFSGSLLGGKAALTLSGVQPEDEAEYYCVLWYSNRWVFGGGTKLTVL

SEQ ID NO: 302 - DNA, 1515 bp, synthetic construct
  misc_feature 1..1515: note = CD33 E11 HL x F12Q HL
  source 1..1515: mol_type = other DNA
caggtgcagctggtgcagtctggagctgaggtgaagaagcctggagagtcagtcaaggtctcctgcaaggctagcgggtataccttcacaaactatggaatgaactgggtgaagcaggctccaggacagggtttagagtggatgggctggataaacacctacactggagagccaacctatgctgataagttccagggacgcgttaccatgactacggatacctctaccagcactgcctatatggaaatccgcaacctcggaggtgatgacacggctgtatattactgtgcgcgctggagttggagtgatggttactacgtttactttgactactggggccaaggcacttcggtcaccgtctcctcaggtggtggtggttctggcggcggcggctccggtggtggtggttctgacatcgtgatgacacagtctccagactccctgactgtgtctctgggcgagaggaccaccatcaactgcaagtccagccagagtgttttagacagctccacgaataagaactccttagcttggtaccagcagaaaccaggacagcctcctaaattactcctttcctgggcatctacgcgggaatccgggatccctgaccgattcagtggcagcgggtctgggacagatttcactctcactattgacagcccgcagcctgaagattctgcaacttactattgtcaacagtctgcccacttcccgatcacctttggccaagggacacgactggagattaaatccggaggtggtggctccgaggtgcagctggtcgagtctggaggaggattggtgcagcctggagggtcattgaaactctcatgtgcagcctctggattcaccttcaatagctacgccatgaactgggtccgccaggctccaggaaagggtttggaatgggttgctcgcataagaagtaaatataataattatgcaacatattatgccgattcagtgaaaggcaggttcaccatctccagagatgattcaaaaaacactgcctatctacaaatgaacaacttgaaaactgaggacactgccgtgtactactgtgtgagacatgggaacttcggtaatagctacgtttcctggtgggcttactggggccaagggactctggtcaccgtctcctcaggtggtggtggttctggcggcggcggctccggtggtggtggttctcagactgttgtgactcaggaaccttcactcaccgtatcacctggtggaacagtcacactcacttgtggctcctcgactggggctgttacatctggcaactacccaaactgggtccaacaaaaaccaggtcaggcaccccgtggtctaataggtgggactaagttcctcgcccccggtactcctgccagattctcaggctccctgcttggaggcaaggctgccctcaccctctcaggggtacagccagaggatgaggcagaatattactgtgttctatggtacagcaaccgctgggtgttcggtggaggaaccaaactgactgtccta

SEQ ID NO: 303 - protein, 505 aa, synthetic construct
  REGION 1..505: note = CD33 E11 HL x I2C HL
QVQLVQSGAEVKKPGESVKVSCKASGYTFTNYGMNWVKQAPGQGLEWMGWINTYTGEPTYADKFQGRVTMTTDTSTSTAYMEIRNLGGDDTAVYYCARWSWSDGYYVYFDYWGQGTSVTVSSGGGGSGGGGSGGGGSDIVMTQSPDSLTVSLGERTTINCKSSQSVLDSSTNKNSLAWYQQKPGQPPKLLLSWASTRESGIPDRFSGSGSGTDFTLTIDSPQPEDSATYYCQQSAHFPITFGQGTRLEIKSGGGGSEVQLVESGGGLVQPGGSLKLSCAASGFTFNKYAMNWVRQAPGKGLEWVARIRSKYNNYATYYADSVKDRFTISRDDSKNTAYLQMNNLKTEDTAVYYCVRHGNFGNSYISYWAYWGQGTLVTVSSGGGGSGGGGSGGGGSQTVVTQEPSLTVSPGGTVTLTCGSSTGAVTSGNYPNWVQQKPGQAPRGLIGGTKFLAPGTPARFSGSLLGGKAALTLSGVQPEDEAEYYCVLWYSNRWVFGGGTKLTVL

SEQ ID NO: 304 - DNA, 1515 bp, synthetic construct
  misc_feature 1..1515: note = CD33 E11 HL x I2C HL
  source 1..1515: mol_type = other DNA
caggtgcagctggtgcagtctggagctgaggtgaagaagcctggagagtcagtcaaggtctcctgcaaggctagcgggtataccttcacaaactatggaatgaactgggtgaagcaggctccaggacagggtttagagtggatgggctggataaacacctacactggagagccaacctatgctgataagttccagggacgcgttaccatgactacggatacctctaccagcactgcctatatggaaatccgcaacctcggaggtgatgacacggctgtatattactgtgcgcgctggagttggagtgatggttactacgtttactttgactactggggccaaggcacttcggtcaccgtctcctcaggtggtggtggttctggcggcggcggctccggtggtggtggttctgacatcgtgatgacacagtctccagactccctgactgtgtctctgggcgagaggaccaccatcaactgcaagtccagccagagtgttttagacagctccacgaataagaactccttagcttggtaccagcagaaaccaggacagcctcctaaattactcctttcctgggcatctacgcgggaatccgggatccctgaccgattcagtggcagcgggtctgggacagatttcactctcactattgacagcccgcagcctgaagattctgcaacttactattgtcaacagtctgcccacttcccgatcacctttggccaagggacacgactggagattaaatccggaggtggtggctccgaggtgcagctggtcgagtctggaggaggattggtgcagcctggagggtcattgaaactctcatgtgcagcctctggattcaccttcaataagtacgccatgaactgggtccgccaggctccaggaaagggtttggaatgggttgctcgcataagaagtaaatataataattatgcaacatattatgccgattcagtgaaagacaggttcaccatctccagagatgattcaaaaaacactgcctatctacaaatgaacaacttgaaaactgaggacactgccgtgtactactgtgtgagacatgggaacttcggtaatagctacatatcctactgggcttactggggccaagggactctggtcaccgtctcctcaggtggtggtggttctggcggcggcggctccggtggtggtggttctcagactgttgtgactcaggaaccttcactcaccgtatcacctggtggaacagtcacactcacttgtggctcctcgactggggctgttacatctggcaactacccaaactgggtccaacaaaaaccaggtcaggcaccccgtggtctaataggtgggactaagttcctcgcccccggtactcctgccagattctcaggctccctgcttggaggcaaggctgccctcaccctctcaggggtacagccagaggatgaggcagaatattactgtgttctatggtacagcaaccgctgggtgttcggtggaggaaccaaactgactgtccta

SEQ ID NO: 305 - DNA, 1125 bp, Homo sapiens
  source 1..1125: mol_type = genomic DNA
atgggatggagctgtatcatcctcttcttggtagcaacagctacaggtgtacactccgatccaaatttctggctgcaagtgcaggagtcagtgacggtacaggagggtttgtgcgtcctcgtgccctgcactttcttccatcccataccctactacgacaagaactccccagttcatggttactggttccgggaaggagccattatatccggggactctccagtggccacaaacaagctagatcaagaagtacaggaggagactcagggcagattccgcctccttggggatcccagtaggaacaactgctccctgagcatcgtagacgccaggaggagggataatggttcatacttctttcggatggagagaggaagtaccaaatacagttacaaatctccccagctctctgtgcatgtgacagacttgacccacaggcccaaaatcctcatccctggcactctagaacccggccactccaaaaacctgacctgctctgtgtcctgggcctgtgagcagggaacacccccgatcttctcctggttgtcagctgcccccacctccctgggccccaggactactcactcctcggtgctcataatcaccccacggccccaggaccacggcaccaacctgacctgtcaggtgaagttcgctggagctggtgtgactacggagagaaccatccagctcaacgtcacctatgttccacagaacccaacaactggtatctttccaggagatggctcagggaaacaagagaccagagcaggagtggttcatggggccattggaggagctggtgttacagccctgctcgctctttgtctctgcctcatcttcttcatagtgaagacccacaggaggaaagcagccaggacagcagtgggcaggaatgacacccaccctaccacagggtcagcctccccgaaacaccagaagaagtccaagttacatggccccactgaaacctcaagctgttcaggtgccgcccctactgtggagatggatgaggagctgcattatgcttccctcaactttcatgggatgaatccttccaaggacacctccaccgaatactcagaggtcaggacccagtccgggcatcatcaccatcatcattga

SEQ ID NO: 306 - protein, 374 aa, Homo sapiens
MGWSCIILFLVATATGVHSDPNFWLQVQESVTVQEGLCVLVPCTFFHPIPYYDKNSPVHGYWFREGAIISGDSPVATNKLDQEVQEETQGRFRLLGDPSRNNCSLSIVDARRRDNGSYFFRMERGSTKYSYKSPQLSVHVTDLTHRPKILIPGTLEPGHSKNLTCSVSWACEQGTPPIFSWLSAAPTSLGPRTTHSSVLIITPRPQDHGTNLTCQVKFAGAGVTTERTIQLNVTYVPQNPTTGIFPGDGSGKQETRAGVVHGAIGGAGVTALLALCLCLIFFIVKTHRRKAARTAVGRNDTHPTTGSASPKHQKKSKLHGPTETSSCSGAAPTVEMDEELHYASLNFHGMNPSKDTSTEYSEVRTQSGHHHHHH

SEQ ID NO: 307 - DNA, 1083 bp, Macaca sp.
  source 1..1083: mol_type = genomic DNA
atgccgctgctgctactgctgcccctgctgtgggcaggggccctggctatggatccaagagtcaggctggaagtgcaggagtcagtgacagtacaggagggtttgtgcgtccttgtgccctgcactttcttccatcccgtaccctaccacaccaggaattccccagttcatggttactggttccgggaaggagccattgtatccttggactctccagtggccacaaacaagctagatcaagaagtacaggaggagacccagggccgattccgcctccttggggatcccagtaggaacaactgctccctgagcatcgtagatgccaggaggagggataacggttcatacttctttcggatggagaaaggaagtaccaaatacagttacaaatctacccagctctctgtgcatgtgacagacttgacccacaggccccaaatcctcatccctggagccctagaccctgaccactccaaaaacctgacctgctctgtgccctgggcctgtgagcagggaacacctccaatcttctcctggatgtcagctgcccccacctccctgggcctcaggaccactcactcctcggtgctcataatcaccccacggccccaggaccacggcaccaacctcacctgtcaggtgaagttccctggagctggcgtgaccacggagagaaccatccagctcaatgtctcctatgcttcacagaacccaagaactgatatctttctaggagacggctcagggaaacaaggagtggttcagggagccatcgggggagctggtgtcacagtcctgctcgctctttgtctctgcctcatcttcttcacagtgaagactcacaggaggaaagcagccaggacagcagtgggcaggatcgacacccaccccgccacagggccaacatcctcgaaacaccagaagaagtccaagttacatggcgccactgaaacctcaggctgttcaggtaccacccttactgtggagatggatgaggagctgcactacgcttccctcaactttcatgggatgaatccttctgaggacacctccaccgaatactcagaggtcaggacccagtga

SEQ ID NO: 308 - protein, 360 aa, Macaca sp.
MPLLLLLPLLWAGALAMDPRVRLEVQESVTVQEGLCVLVPCTFFHPVPYHTRNSPVHGYWFREGAIVSLDSPVATNKLDQEVQEETQGRFRLLGDPSRNNCSLSIVDARRRDNGSYFFRMEKGSTKYSYKSTQLSVHVTDLTHRPQILIPGALDPDHSKNLTCSVPWACEQGTPPIFSWMSAAPTSLGLRTTHSSVLIITPRPQDHGTNLTCQVKFPGAGVTTERTIQLNVSYASQNPRTDIFLGDGSGKQGVVQGAIGGAGVTVLLALCLCLIFFTVKTHRRKAARTAVGRIDTHPATGPTSSKHQKKSKLHGATETSGCSGTTLTVEMDEELHYASLNFHGMNPSEDTSTEYSEVRTQ

SEQ ID NO: 309 - DNA, 843 bp, synthetic construct
  misc_feature 1..843: note = 1-27 CD3-Fc + Leader
  source 1..843: mol_type = other DNA
atgggatggagctgtatcatcctcttcttggtagcaacagctacaggtgtacactcccaagatggtaatgaagaaatgggtggtattacacagacaccatataaagtctccatctctggaaccacagtaatattgacatccggagagcccaaatcttgtgacaaaactcacacatgcccaccgtgcccagcacctgaactcctggggggaccgtcagtcttcctcttccccccaaaacccaaggacaccctcatgatctcccggacccctgaggtcacatgcgtggtggtggacgtgagccacgaagaccctgaggtcaagttcaactggtacgtggacggcgtggaggtgcataatgccaagacaaagccgcgggaggagcagtacaacagcacgtaccgtgtggtcagcgtcctcaccgtcctgcaccaggactggctgaatggcaaggagtacaagtgcaaggtctccaacaaagccctcccagcccccatcgagaaaaccatctccaaagccaaagggcagccccgagaaccacaggtgtacaccctgcccccatcccgggaggagatgaccaagaaccaggtcagcctgacctgcctggtcaaaggcttctatcccagcgacatcgccgtggagtgggagagcaatgggcagccggagaacaactacaagaccacgcctcccgtgctggactccgacggctccttcttcctctatagcaagctcaccgtggacaagagcaggtggcagcaggggaacgtcttctcatgctccgtgatgcatgaggctctgcacaaccactacacgcagaagagcctctccctgtccccgggtaaatag

SEQ ID NO: 310 - protein, 280 aa, synthetic construct
  REGION 1..280: note = 1-27 CD3-Fc + Leader
MGWSCIILFLVATATGVHSQDGNEEMGGITQTPYKVSISGTTVILTSGEPKSCDKTHTCPPCPAPELLGGPSVFLFPPKPKDTLMISRTPEVTCVVVDVSHEDPEVKFNWYVDGVEVHNAKTKPREEQYNSTYRVVSVLTVLHQDWLNGKEYKCKVSNKALPAPIEKTISKAKGQPREPQVYTLPPSREEMTKNQVSLTCLVKGFYPSDIAVEWESNGQPENNYKTTPPVLDSDGSFFLYSKLTVDKSRWQQGNVFSCSVMHEALHNHYTQKSLSLSPGK

SEQ ID NO: 311 - protein, 505 aa, synthetic construct
  REGION 1..505: note = CD33 UD H2C HL x AF5 HL
EVQLVESGGGLVQPGGSLKLSCAASGFTFNKYAMNWVRQAPGKGLEWVARIRSKYNNYATYYADSVKDRFTISRDDSKNTAYLQMNNLKTEDTAVYYCVRHGNFGNSYISYWAYWGQGTLVTVSSGGGGSGGGGSGGGGSQTVVTQEPSLTVSPGGTVTLTCGSSTGAVTSGYYPNWVQQKPGQAPRGLIGGTKFLAPGTPARFSGSLLGGKAALTLSGVQPEDEAEYYCALWYSNRWVFGGGTKLTVLSGGGGSQVQLVQSGAEVKKPGASVKVSCKASGYTFTNYGMNWVKQAPGQGLKWMGWINTYTGEPTYADDFKGRVTMTSDTSTSTAYLELHNLRSDDTAVYYCARWSWSDGYYVYFDYWGQGTTVTVSSGGGGSGGGGSGGGGSDIVMTQSPDSLTVSLGERTTINCKSSQSVLDSSKNKNSLAWYQQKPGQPPKLLLSWASTRESGIPDRFSGSGSGTDFTLTIDSLQPEDSATYYCQQSAHFPITFGQGTRLEIK

SEQ ID NO: 312 - DNA, 1515 bp, synthetic construct
  misc_feature 1..1515: note = CD33 UD H2C HL x AF5 HL
  source 1..1515: mol_type = other DNA
gaggtgcagctggtcgagtctggaggaggattggtgcagcctggagggtcattgaaactctcatgtgcagcctctggattcaccttcaataagtacgccatgaactgggtccgccaggctccaggaaagggtttggaatgggttgctcgcataagaagtaaatataataattatgcaacatattatgccgattcagtgaaagacaggttcaccatctccagagatgattcaaaaaacactgcctatctacaaatgaacaacttgaaaactgaggacactgccgtgtactactgtgtgagacatgggaacttcggtaatagctacatatcctactgggcttactggggccaagggactctggtcaccgtctcctcaggtggtggtggttctggcggcggcggctccggtggtggtggttctcagactgttgtgactcaggaaccttcactcaccgtatcacctggtggaacagtcacactcacttgtggctcctcgactggggctgttacatctggctactacccaaactgggtccaacaaaaaccaggtcaggcaccccgtggtctaataggtgggactaagttcctcgcccccggtactcctgccagattctcaggctccctgcttggaggcaaggctgccctcaccctctcaggggtacagccagaggatgaggcagaatattactgtgctctatggtacagcaaccgctgggtgttcggtggaggaaccaaactgactgtcctatccggaggtggtggctcccaggtgcagctggtccagtctggagctgaggtgaagaagcctggagcgtcagtcaaggtctcctgcaaggctagcgggtataccttcacaaactatggaatgaactgggtgaagcaggctccaggacagggtttaaagtggatgggctggataaacacctacactggagagccaacatatgctgatgacttcaagggacgggttaccatgacttcggatacctctaccagcactgcctatttggaactccacaacctcagaagtgatgacacggctgtatattactgtgcgcgctggagttggagtgatggttactacgtttactttgactactggggccaaggcactacggtcaccgtctcctcaggtggtggtggttctggcggcggcggctccggtggtggtggttctgacatcgtgatgacacagtctccagactccctgactgtgtctctgggcgagaggaccaccatcaactgcaagtccagccagagtgttttagacagctccaagaataagaactccttagcttggtaccagcagaaaccaggacagcctcctaaattactcctttcctgggcatctacgcgggaatccgggatccctgaccgattcagtggcagcgggtctgggacagatttcactctcactattgacagcctgcagcctgaagattctgcaacttactattgtcaacagtctgcccacttcccgatcacctttggccaagggacacgactggagattaaa

SEQ ID NO: 313 - protein, 505 aa, synthetic construct
  REGION 1..505: note = CD33 UD F12Q HL x AF5 HL
EVQLVESGGGLVQPGGSLKLSCAASGFTFNSYAMNWVRQAPGKGLEWVARIRSKYNNYATYYADSVKGRFTISRDDSKNTAYLQMNNLKTEDTAVYYCVRHGNFGNSYVSWWAYWGQGTLVTVSSGGGGSGGGGSGGGGSQTVVTQEPSLTVSPGGTVTLTCGSSTGAVTSGNYPNWVQQKPGQAPRGLIGGTKFLAPGTPARFSGSLLGGKAALTLSGVQPEDEAEYYCVLWYSNRWVFGGGTKLTVLSGGGGSQVQLVQSGAEVKKPGASVKVSCKASGYTFTNYGMNWVKQAPGQGLKWMGWINTYTGEPTYADDFKGRVTMTSDTSTSTAYLELHNLRSDDTAVYYCARWSWSDGYYVYFDYWGQGTTVTVSSGGGGSGGGGSGGGGSDIVMTQSPDSLTVSLGERTTINCKSSQSVLDSSKNKNSLAWYQQKPGQPPKLLLSWASTRESGIPDRFSGSGSGTDFTLTIDSLQPEDSATYYCQQSAHFPITFGQGTRLEIK

SEQ ID NO: 314 - DNA, 1515 bp, synthetic construct
  misc_feature 1..1515: note = CD33 UD F12Q HL x AF5 HL
  source 1..1515: mol_type = other DNA
gaggtgcagctggtcgagtctggaggaggattggtgcagcctggagggtcattgaaactctcatgtgcagcctctggattcaccttcaatagctacgccatgaactgggtccgccaggctccaggaaagggtttggaatgggttgctcgcataagaagtaaatataataattatgcaacatattatgccgattcagtgaaaggcaggttcaccatctccagagatgattcaaaaaacactgcctatctacaaatgaacaacttgaaaactgaggacactgccgtgtactactgtgtgagacatgggaacttcggtaatagctacgtttcctggtgggcttactggggccaagggactctggtcaccgtctcctcaggtggtggtggttctggcggcggcggctccggtggtggtggttctcagactgttgtgactcaggaaccttcactcaccgtatcacctggtggaacagtcacactcacttgtggctcctcgactggggctgttacatctggcaactacccaaactgggtccaacaaaaaccaggtcaggcaccccgtggtctaataggtgggactaagttcctcgcccccggtactcctgccagattctcaggctccctgcttggaggcaaggctgccctcaccctctcaggggtacagccagaggatgaggcagaatattactgtgttctatggtacagcaaccgctgggtgttcggtggaggaaccaaactgactgtcctatccggaggtggtggctcccaggtgcagctggtccagtctggagctgaggtgaagaagcctggagcgtcagtcaaggtctcctgcaaggctagcgggtataccttcacaaactatggaatgaactgggtgaagcaggctccaggacagggtttaaagtggatgggctggataaacacctacactggagagccaacatatgctgatgacttcaagggacgggttaccatgacttcggatacctctaccagcactgcctatttggaactccacaacctcagaagtgatgacacggctgtatattactgtgcgcgctggagttggagtgatggttactacgtttactttgactactggggccaaggcactacggtcaccgtctcctcaggtggtggtggttctggcggcggcggctccggtggtggtggttctgacatcgtgatgacacagtctccagactccctgactgtgtctctgggcgagaggaccaccatcaactgcaagtccagccagagtgttttagacagctccaagaataagaactccttagcttggtaccagcagaaaccaggacagcctcctaaattactcctttcctgggcatctacgcgggaatccgggatccctgaccgattcagtggcagcgggtctgggacagatttcactctcactattgacagcctgcagcctgaagattctgcaacttactattgtcaacagtctgcccacttcccgatcacctttggccaagggacacgactggagattaaa

SEQ ID NO: 315 - protein, 505 aa, synthetic construct
  REGION 1..505: note = CD33 UD I2C HL x AF5 HL
EVQLVESGGGLVQPGGSLKLSCAASGFTFNKYAMNWVRQAPGKGLEWVARIRSKYNNYATYYADSVKDRFTISRDDSKNTAYLQMNNLKTEDTAVYYCVRHGNFGNSYISYWAYWGQGTLVTVSSGGGGSGGGGSGGGGSQTVVTQEPSLTVSPGGTVTLTCGSSTGAVTSGNYPNWVQQKPGQAPRGLIGGTKFLAPGTPARFSGSLLGGKAALTLSGVQPEDEAEYYCVLWYSNRWVFGGGTKLTVLSGGGGSQVQLVQSGAEVKKPGASVKVSCKASGYTFTNYGMNWVKQAPGQGLKWMGWINTYTGEPTYADDFKGRVTMTSDTSTSTAYLELHNLRSDDTAVYYCARWSWSDGYYVYFDYWGQGTTVTVSSGGGGSGGGGSGGGGSDIVMTQSPDSLTVSLGERTTINCKSSQSVLDSSKNKNSLAWYQQKPGQPPKLLLSWASTRESGIPDRFSGSGSGTDFTLTIDSLQPEDSATYYCQQSAHFPITFGQGTRLEIK

SEQ ID NO: 316 - DNA, 1515 bp, synthetic construct
  misc_feature 1..1515: note = CD33 UD I2C HL x AF5 HL
  source 1..1515: mol_type = other DNA
gaggtgcagctggtcgagtctggaggaggattggtgcagcctggagggtcattgaaactctcatgtgcagcctctggattcaccttcaataagtacgccatgaactgggtccgccaggctccaggaaagggtttggaatgggttgctcgcataagaagtaaatataataattatgcaacatattatgccgattcagtgaaagacaggttcaccatctccagagatgattcaaaaaacactgcctatctacaaatgaacaacttgaaaactgaggacactgccgtgtactactgtgtgagacatgggaacttcggtaatagctacatatcctactgggcttactggggccaagggactctggtcaccgtctcctcaggtggtggtggttctggcggcggcggctccggtggtggtggttctcagactgttgtgactcaggaaccttcactcaccgtatcacctggtggaacagtcacactcacttgtggctcctcgactggggctgttacatctggcaactacccaaactgggtccaacaaaaaccaggtcaggcaccccgtggtctaataggtgggactaagttcctcgcccccggtactcctgccagattctcaggctccctgcttggaggcaaggctgccctcaccctctcaggggtacagccagaggatgaggcagaatattactgtgttctatggtacagcaaccgctgggtgttcggtggaggaaccaaactgactgtcctatccggaggtggtggctcccaggtgcagctggtccagtctggagctgaggtgaagaagcctggagcgtcagtcaaggtctcctgcaaggctagcgggtataccttcacaaactatggaatgaactgggtgaagcaggctccaggacagggtttaaagtggatgggctggataaacacctacactggagagccaacatatgctgatgacttcaagggacgggttaccatgacttcggatacctctaccagcactgcctatttggaactccacaacctcagaagtgatgacacggctgtatattactgtgcgcgctggagttggagtgatggttactacgtttactttgactactggggccaaggcactacggtcaccgtctcctcaggtggtggtggttctggcggcggcggctccggtggtggtggttctgacatcgtgatgacacagtctccagactccctgactgtgtctctgggcgagaggaccaccatcaactgcaagtccagccagagtgttttagacagctccaagaataagaactccttagcttggtaccagcagaaaccaggacagcctcctaaattactcctttcctgggcatctacgcgggaatccgggatccctgaccgattcagtggcagcgggtctgggacagatttcactctcactattgacagcctgcagcctgaagattctgcaacttactattgtcaacagtctgcccacttcccgatcacctttggccaagggacacgactggagattaaa

SEQ ID NO: 317 - protein, 500 aa, synthetic construct
  REGION 1..500: note = MCSP-A9 HL x H2C HL
QVQLVQSGAEVKKPGASVKVSCKASGYPFTGYYMHWVRQAPGQGLEWMGWINPNSGGTNYAQKFQGRVTITADESTSTAYMELSRLRSDDTAVYYCAKSWVSWFASWGQGTLVTVSSGGGGSGGGGSGGGGSDIVMTQSPDSLAVSLGERATINCKSSQSVLSSSNNKNYLNWYQQKPGQPPKLLIYWASTRESGVPDRFSGSGSGTDFTLTISSLQAEDVAVYYCQQHFNTPFAFGQGTKLEIKSGGGGSEVQLVESGGGLVQPGGSLKLSCAASGFTFNKYAMNWVRQAPGKGLEWVARIRSKYNNYATYYADSVKDRFTISRDDSKNTAYLQMNNLKTEDTAVYYCVRHGNFGNSYISYWAYWGQGTLVTVSSGGGGSGGGGSGGGGSQTVVTQEPSLTVSPGGTVTLTCGSSTGAVTSGYYPNWVQQKPGQAPRGLIGGTKFLAPGTPARFSGSLLGGKAALTLSGVQPEDEAEYYCALWYSNRWVFGGGTKLTVL

SEQ ID NO: 318 - DNA, 1500 bp, synthetic construct
  misc_feature 1..1500: note = MCSP-A9 HL x H2C HL
  source 1..1500: mol_type = other DNA
caggtgcagctggtccagtctggggctgaggtgaagaagcctggggcctcagtgaaggtctcctgcaaggcttctggataccccttcaccggctactacatgcactgggtgcgacaggcccctggacaagggcttgagtggatgggatggatcaaccctaacagtggtggcacaaactatgcacagaagtttcagggcagagtcacgattaccgcggacgaatccacgagcacagcctacatggagctgagcaggctgagatctgacgacacggccgtgtattactgtgcgaaatcctgggtctcctggtttgcttcctggggtcaaggaaccttggtcaccgtctcctcaggtggtggtggttctggcggcggcggctccggtggtggtggttctgacatcgtgatgacacagtctccagactccctggctgtgtctctgggcgagagggccaccatcaactgcaagtccagccagagtgtcttatccagctccaacaataagaactacttaaattggtaccagcagaaaccaggacagcctcctaagttgctcatttactgggcatctacccgggaatccggggtccctgaccgattcagtggcagcgggtctgggacagatttcactctcaccatcagcagcctgcaggctgaagatgtggcggtttattactgtcaacaacattttaatactccgttcgcttttggccaggggaccaagctggagatcaaatccggaggtggtggatccgaggtgcagctggtcgagtctggaggaggattggtgcagcctggagggtcattgaaactctcatgtgcagcctctggattcaccttcaataagtacgccatgaactgggtccgccaggctccaggaaagggtttggaatgggttgctcgcataagaagtaaatataataattatgcaacatattatgccgattcagtgaaagacaggttcaccatctccagagatgattcaaaaaacactgcctatctacaaatgaacaacttgaaaactgaggacactgccgtgtactactgtgtgagacatgggaacttcggtaatagctacatatcctactgggcttactggggccaagggactctggtcaccgtctcctcaggtggtggtggttctggcggcggcggctccggtggtggtggttctcagactgttgtgactcaggaaccttcactcaccgtatcacctggtggaacagtcacactcacttgtggctcctcgactggggctgttacatctggctactacccaaactgggtccaacaaaaaccaggtcaggcaccccgtggtctaataggtgggactaagttcctcgcccccggtactcctgccagattctcaggctccctgcttggaggcaaggctgccctcaccctctcaggggtacagccagaggatgaggcagaatattactgtgctctatggtacagcaaccgctgggtgttcggtggaggaaccaaactgactgtccta

SEQ ID NO: 319 - protein, 500 aa, synthetic construct
  REGION 1..500: note = MCSP-A9 HL x F12Q HL
QVQLVQSGAEVKKPGASVKVSCKASGYPFTGYYMHWVRQAPGQGLEWMGWINPNSGGTNYAQKFQGRVTITADESTSTAYMELSRLRSDDTAVYYCAKSWVSWFASWGQGTLVTVSSGGGGSGGGGSGGGGSDIVMTQSPDSLAVSLGERATINCKSSQSVLSSSNNKNYLNWYQQKPGQPPKLLIYWASTRESGVPDRFSGSGSGTDFTLTISSLQAEDVAVYYCQQHFNTPFAFGQGTKLEIKSGGGGSEVQLVESGGGLVQPGGSLKLSCAASGFTFNSYAMNWVRQAPGKGLEWVARIRSKYNNYATYYADSVKGRFTISRDDSKNTAYLQMNNLKTEDTAVYYCVRHGNFGNSYVSWWAYWGQGTLVTVSSGGGGSGGGGSGGGGSQTVVTQEPSLTVSPGGTVTLTCGSSTGAVTSGNYPNWVQQKPGQAPRGLIGGTKFLAPGTPARFSGSLLGGKAALTLSGVQPEDEAEYYCVLWYSNRWVFGGGTKLTVL

SEQ ID NO: 320 - DNA, 1500 bp, synthetic construct
  misc_feature 1..1500: note = MCSP-A9 HL x F12Q HL
  source 1..1500: mol_type = other DNA
caggtgcagctggtccagtctggggctgaggtgaagaagcctggggcctcagtgaaggtctcctgcaaggcttctggataccccttcaccggctactacatgcactgggtgcgacaggcccctggacaagggcttgagtggatgggatggatcaaccctaacagtggtggcacaaactatgcacagaagtttcagggcagagtcacgattaccgcggacgaatccacgagcacagcctacatggagctgagcaggctgagatctgacgacacggccgtgtattactgtgcgaaatcctgggtctcctggtttgcttcctggggtcaaggaaccttggtcaccgtctcctcaggtggtggtggttctggcggcggcggctccggtggtggtggttctgacatcgtgatgacacagtctccagactccctggctgtgtctctgggcgagagggccaccatcaactgcaagtccagccagagtgtcttatccagctccaacaataagaactacttaaattggtaccagcagaaaccaggacagcctcctaagttgctcatttactgggcatctacccgggaatccggggtccctgaccgattcagtggcagcgggtctgggacagatttcactctcaccatcagcagcctgcaggctgaagatgtggcggtttattactgtcaacaacattttaatactccgttcgcttttggccaggggaccaagctggagatcaaatccggaggtggtggatccgaggtgcagctggtcgagtctggaggaggattggtgcagcctggagggtcattgaaactctcatgtgcagcctctggattcaccttcaatagctacgccatgaactgggtccgccaggctccaggaaagggtttggaatgggttgctcgcataagaagtaaatataataattatgcaacatattatgccgattcagtgaaaggcaggttcaccatctccagagatgattcaaaaaacactgcctatctacaaatgaacaacttgaaaactgaggacactgccgtgtactactgtgtgagacatgggaacttcggtaatagctacgtttcctggtgggcttactggggccaagggactctggtcaccgtctcctcaggtggtggtggttctggcggcggcggctccggtggtggtggttctcagactgttgtgactcaggaaccttcactcaccgtatcacctggtggaacagtcacactcacttgtggctcctcgactggggctgttacatctggcaactacccaaactgggtccaacaaaaaccaggtcaggcaccccgtggtctaataggtgggactaagttcctcgcccccggtactcctgccagattctcaggctccctgcttggaggcaaggctgccctcaccctctcaggggtacagccagaggatgaggcagaatattactgtgttctatggtacagcaaccgctgggtgttcggtggaggaaccaaactgactgtccta

SEQ ID NO: 321 - protein, 500 aa, synthetic construct
  REGION 1..500: note = MCSP-A9 HL x I2C HL
QVQLVQSGAEVKKPGASVKVSCKASGYPFTGYYMHWVRQAPGQGLEWMGWINPNSGGTNYAQKFQGRVTITADESTSTAYMELSRLRSDDTAVYYCAKSWVSWFASWGQGTLVTVSSGGGGSGGGGSGGGGSDIVMTQSPDSLAVSLGERATINCKSSQSVLSSSNNKNYLNWYQQKPGQPPKLLIYWASTRESGVPDRFSGSGSGTDFTLTISSLQAEDVAVYYCQQHFNTPFAFGQGTKLEIKSGGGGSEVQLVESGGGLVQPGGSLKLSCAASGFTFNKYAMNWVRQAPGKGLEWVARIRSKYNNYATYYADSVKDRFTISRDDSKNTAYLQMNNLKTEDTAVYYCVRHGNFGNSYISYWAYWGQGTLVTVSSGGGGSGGGGSGGGGSQTVVTQEPSLTVSPGGTVTLTCGSSTGAVTSGNYPNWVQQKPGQAPRGLIGGTKFLAPGTPARFSGSLLGGKAALTLSGVQPEDEAEYYCVLWYSNRWVFGGGTKLTVL

SEQ ID NO: 322 - DNA, 1500 bp, synthetic construct
  misc_feature 1..1500: note = MCSP-A9 HL x I2C HL
  source 1..1500: mol_type = other DNA
caggtgcagctggtccagtctggggctgaggtgaagaagcctggggcctcagtgaaggtctcctgcaaggcttctggataccccttcaccggctactacatgcactgggtgcgacaggcccctggacaagggcttgagtggatgggatggatcaaccctaacagtggtggcacaaactatgcacagaagtttcagggcagagtcacgattaccgcggacgaatccacgagcacagcctacatggagctgagcaggctgagatctgacgacacggccgtgtattactgtgcgaaatcctgggtctcctggtttgcttcctggggtcaaggaaccttggtcaccgtctcctcaggtggtggtggttctggcggcggcggctccggtggtggtggttctgacatcgtgatgacacagtctccagactccctggctgtgtctctgggcgagagggccaccatcaactgcaagtccagccagagtgtcttatccagctccaacaataagaactacttaaattggtaccagcagaaaccaggacagcctcctaagttgctcatttactgggcatctacccgggaatccggggtccctgaccgattcagtggcagcgggtctgggacagatttcactctcaccatcagcagcctgcaggctgaagatgtggcggtttattactgtcaacaacattttaatactccgttcgcttttggccaggggaccaagctggagatcaaatccggaggtggtggatccgaggtgcagctggtcgagtctggaggaggattggtgcagcctggagggtcattgaaactctcatgtgcagcctctggattcaccttcaataagtacgccatgaactgggtccgccaggctccaggaaagggtttggaatgggttgctcgcataagaagtaaatataataattatgcaacatattatgccgattcagtgaaagacaggttcaccatctccagagatgattcaaaaaacactgcctatctacaaatgaacaacttgaaaactgaggacactgccgtgtactactgtgtgagacatgggaacttcggtaatagctacatatcctactgggcttactggggccaagggactctggtcaccgtctcctcaggtggtggtggttctggcggcggcggctccggtggtggtggttctcagactgttgtgactcaggaaccttcactcaccgtatcacctggtggaacagtcacactcacttgtggctcctcgactggggctgttacatctggcaactacccaaactgggtccaacaaaaaccaggtcaggcaccccgtggtctaataggtgggactaagttcctcgcccccggtactcctgccagattctcaggctccctgcttggaggcaaggctgccctcaccctctcaggggtacagccagaggatgaggcagaatattactgtgttctatggtacagcaaccgctgggtgttcggtggaggaaccaaactgactgtccta

SEQ ID NO: 323 - protein, 500 aa, synthetic construct
  REGION 1..500: note = MCSP-C8 HL x I2C HL
QVQLVQSGAEVKRPGASMKVSCKASGYTFTNYYIHWVRQAPGQGLEWMGWINPNSGATNYAQKFQGRVTMTRDTSTSTVYMELSSLRSEDTAVYYCAKSWVSWFASWGQGTLVTVSSGGGGSGGGGSGGGGSDIVMTQSPDSLAVSLGERATINCKSSQSVLNSKNNRNYLAWYQQKPGQPPKLLIYWASTRESGVPDRFSGSGSGTDFTLTISGLQAEDVAVYYCQQHYSTPFTFGPGTKVDIKSGGGGSEVQLVESGGGLVQPGGSLKLSCAASGFTFNKYAMNWVRQAPGKGLEWVARIRSKYNNYATYYADSVKDRFTISRDDSKNTAYLQMNNLKTEDTAVYYCVRHGNFGNSYISYWAYWGQGTLVTVSSGGGGSGGGGSGGGGSQTVVTQEPSLTVSPGGTVTLTCGSSTGAVTSGNYPNWVQQKPGQAPRGLIGGTKFLAPGTPARFSGSLLGGKAALTLSGVQPEDEAEYYCVLWYSNRWVFGGGTKLTVL

SEQ ID NO: 324 - DNA, 1500 bp, synthetic construct
  misc_feature 1..1500: note = MCSP-C8 HL x I2C HL
  source 1..1500: mol_type = other DNA
caggtgcagctggtccagtctggggctgaggtgaagaggcctggggcctcaatgaaggtctcctgcaaggcttctgggtacaccttcaccaactactatatacactgggtgcgacaggcccctggacaaggtcttgagtggatgggttggatcaaccctaacagtggtgccacaaactatgcacagaagttccagggcagagtcaccatgaccagggacacgtccacgagcacagtctacatggagctgagcagcctgagatctgaggacacggccgtgtattactgtgcgaaatcctgggtctcctggtttgcttcctggggtcaaggaaccttggtcaccgtctcctcaggtggtggtggttctggcggcggcggctccggtggtggtggttctgacatcgtgatgacccagtctccagactccctggctgtgtctctgggcgagagggccaccatcaactgcaagtccagccagagtgttttaaacagcaagaacaataggaactacttagcttggtaccagcagaaaccaggacagcctcctaagctgctcatttactgggcatctacccgggaatccggggtccctgaccgattcagtggcagcgggtctgggacagatttcactctcaccatcagtggcctgcaggctgaagatgtggcagtttattactgtcagcaacattatagtactccattcacttttggccctgggaccaaagtggatatcaaatccggaggtggtggatccgaggtgcagctggtcgagtctggaggaggattggtgcagcctggagggtcattgaaactctcatgtgcagcctctggattcaccttcaataagtacgccatgaactgggtccgccaggctccaggaaagggtttggaatgggttgctcgcataagaagtaaatataataattatgcaacatattatgccgattcagtgaaagacaggttcaccatctccagagatgattcaaaaaacactgcctatctacaaatgaacaacttgaaaactgaggacactgccgtgtactactgtgtgagacatgggaacttcggtaatagctacatatcctactgggcttactggggccaagggactctggtcaccgtctcctcaggtggtggtggttctggcggcggcggctccggtggtggtggttctcagactgttgtgactcaggaaccttcactcaccgtatcacctggtggaacagtcacactcacttgtggctcctcgactggggctgttacatctggcaactacccaaactgggtccaacaaaaaccaggtcaggcaccccgtggtctaataggtgggactaagttcctcgcccccggtactcctgccagattctcaggctccctgcttggaggcaaggctgccctcaccctctcaggggtacagccagaggatgaggcagaatattactgtgttctatggtacagcaaccgctgggtgttcggtggaggaaccaaactgactgtccta

SEQ ID NO: 325 - protein, 500 aa, synthetic construct
  REGION 1..500: note = MCSP-B8 HL x I2C HL
QVQLVQSGAEVKRPGASMKVSCKASGYTFTNYYIHWVRQAPGQGLEWMGWINPNSGATNYAQKFQGRVTMTRDTSTSTVYMELSSLRSEDTAVYYCAKSWVSWFASWGQGTLVTVSSGGGGSGGGGSGGGGSDIVMTQSPDSLTVSPGERATINCKSSQSVLNSKNNRNYLAWYQQKPGQPPKLLIYWASTRESGVPDRFSGSGSGTDFTLTIDSLQPEDSATYYCQQHYSTPFTFGQGTRLEIKSGGGGSEVQLVESGGGLVQPGGSLKLSCAASGFTFNKYAMNWVRQAPGKGLEWVARIRSKYNNYATYYADSVKDRFTISRDDSKNTAYLQMNNLKTEDTAVYYCVRHGNFGNSYISYWAYWGQGTLVTVSSGGGGSGGGGSGGGGSQTVVTQEPSLTVSPGGTVTLTCGSSTGAVTSGNYPNWVQQKPGQAPRGLIGGTKFLAPGTPARFSGSLLGGKAALTLSGVQPEDEAEYYCVLWYSNRWVFGGGTKLTVL

SEQ ID NO: 326 - DNA, 1500 bp, synthetic construct
  misc_feature 1..1500: note = MCSP-B8 HL x I2C HL
  source 1..1500: mol_type = other DNA
caggtgcagctggtccagtctggggctgaggtgaagaggcctggggcctcaatgaaggtctcctgcaaggcttctgggtacaccttcaccaactactatatacactgggtgcgacaggcccctggacaaggtcttgagtggatgggttggatcaaccctaacagtggtgccacaaactatgcacagaagttccagggcagagtcaccatgaccagggacacgtccacgagcacagtctacatggagctgagcagcctgagatctgaggacacggccgtgtattactgtgcgaaatcctgggtctcctggtttgcttcctggggtcaaggaaccttggtcaccgtctcctcaggtggtggtggttctggcggcggcggctccggtggtggtggttctgacatcgtgatgacccagtctccagactccctgactgtgtctccgggcgagagggccaccatcaactgcaagtccagccagagtgttttaaacagcaagaacaataggaactacttagcttggtaccagcagaaaccaggacagcctcctaagctgctcatttactgggcatctacccgggaatccggggtccctgaccgattcagtggcagcgggtctgggacagatttcactctcaccatcgattccctgcagcctgaagatagtgcaacttattactgtcagcaacattatagtactccattcacttttggccaggggaccagactggagatcaaatccggaggtggtggatccgaggtgcagctggtcgagtctggaggaggattggtgcagcctggagggtcattgaaactctcatgtgcagcctctggattcaccttcaataagtacgccatgaactgggtccgccaggctccaggaaagggtttggaatgggttgctcgcataagaagtaaatataataattatgcaacatattatgccgattcagtgaaagacaggttcaccatctccagagatgattcaaaaaacactgcctatctacaaatgaacaacttgaaaactgaggacactgccgtgtactactgtgtgagacatgggaacttcggtaatagctacatatcctactgggcttactggggccaagggactctggtcaccgtctcctcaggtggtggtggttctggcggcggcggctccggtggtggtggttctcagactgttgtgactcaggaaccttcactcaccgtatcacctggtggaacagtcacactcacttgtggctcctcgactggggctgttacatctggcaactacccaaactgggtccaacaaaaaccaggtcaggcaccccgtggtctaataggtgggactaagttcctcgcccccggtactcctgccagattctcaggctccctgcttggaggcaaggctgccctcaccctctcaggggtacagccagaggatgaggcagaatattactgtgttctatggtacagcaaccgctgggtgttcggtggaggaaccaaactgactgtccta

SEQ ID NO: 327 - protein, 500 aa, synthetic construct
  REGION 1..500: note = MCSP-B7 HL x I2C HL
QVQLVQSGAEVKRPGASMKVSCKASGYTFTNYYIHWVRQAPGQGLEWMGWINPNSGATNYAQKFQGRVTMTRDTSTSTVYMELSSLRSEDTAVYYCAKSWVSWFASWGQGTLVTVSSGGGGSGGGGSGGGGSDIVMTQSPDSLTVSLGERTTINCKSSQSVLNSKNNRNYLAWYQQKPGQPPKLLIYWASTRESGVPDRFSGSGSGTDFTLTIDSLQPEDIATYYCQQHYSTPFTFGQGTRLEIKSGGGGSEVQLVESGGGLVQPGGSLKLSCAASGFTFNKYAMNWVRQAPGKGLEWVARIRSKYNNYATYYADSVKDRFTISRDDSKNTAYLQMNNLKTEDTAVYYCVRHGNFGNSYISYWAYWGQGTLVTVSSGGGGSGGGGSGGGGSQTVVTQEPSLTVSPGGTVTLTCGSSTGAVTSGNYPNWVQQKPGQAPRGLIGGTKFLAPGTPARFSGSLLGGKAALTLSGVQPEDEAEYYCVLWYSNRWVFGGGTKLTVL

SEQ ID NO: 328 - DNA, 1500 bp, synthetic construct
  misc_feature 1..1500: note = MCSP-B7 HL x I2C HL
  source 1..1500: mol_type = other DNA
caggtgcagctggtccagtctggggctgaggtgaagaggcctggggcctcaatgaaggtctcctgcaaggcttctgggtacaccttcaccaactactatatacactgggtgcgacaggcccctggacaaggtcttgagtggatgggttggatcaaccctaacagtggtgccacaaactatgcacagaagttccagggcagagtcaccatgaccagggacacgtccacgagcacagtctacatggagctgagcagcctgagatctgaggacacggccgtgtattactgtgcgaaatcctgggtctcctggtttgcttcctggggtcaaggaaccttggtcaccgtctcctcaggtggtggtggttctggcggcggcggctccggtggtggtggttctgacatcgtgatgacccagtctccagactccctgactgtgtctctgggcgagaggaccaccatcaactgcaagtccagccagagtgttttaaacagcaagaacaataggaactacttagcttggtaccagcagaaaccaggacagcctcctaagctgctcatttactgggcatctacccgggaatccggggtccctgaccgattcagtggcagcgggtctgggacagatttcactctcaccatcgattccctgcagcctgaagatattgcaacttattactgtcagcaacattatagtactccattcacttttggccaggggaccagactggagatcaaatccggaggtggtggatccgaggtgcagctggtcgagtctggaggaggattggtgcagcctggagggtcattgaaactctcatgtgcagcctctggattcaccttcaataagtacgccatgaactgggtccgccaggctccaggaaagggtttggaatgggttgctcgcataagaagtaaatataataattatgcaacatattatgccgattcagtgaaagacaggttcaccatctccagagatgattcaaaaaacactgcctatctacaaatgaacaacttgaaaactgaggacactgccgtgtactactgtgtgagacatgggaacttcggtaatagctacatatcctactgggcttactggggccaagggactctggtcaccgtctcctcaggtggtggtggttctggcggcggcggctccggtggtggtggttctcagactgttgtgactcaggaaccttcactcaccgtatcacctggtggaacagtcacactcacttgtggctcctcgactggggctgttacatctggcaactacccaaactgggtccaacaaaaaccaggtcaggcaccccgtggtctaataggtgggactaagttcctcgcccccggtactcctgccagattctcaggctccctgcttggaggcaaggctgccctcaccctctcaggggtacagccagaggatgaggcagaatattactgtgttctatggtacagcaaccgctgggtgttcggtggaggaaccaaactgactgtccta

SEQ ID NO: 329 - protein, 500 aa, synthetic construct
  REGION 1..500: note = MCSP-G8 HL x I2C HL
QVQLVQSGAEVKRPGASMKVSCKASGYTFTNYYIHWVRQAPGQGLEWMGWINPNSGATNYAQKFQGRVTMTRDTSTSTVYMELSSLRSEDTAVYYCAKSWVSWFASWGQGTLVTVSSGGGGSGGGGSGGGGSDIVMTQSPDSLTVSLGERATINCKSSQSVLNSKNNRNYLAWYQQKPGQPPKLLIYWASTRESGVPDRFSGSGSGTDFTLTIDSLQPEDSATYYCQQHYSTPFTFGQGTRLEIKSGGGGSEVQLVESGGGLVQPGGSLKLSCAASGFTFNKYAMNWVRQAPGKGLEWVARIRSKYNNYATYYADSVKDRFTISRDDSKNTAYLQMNNLKTEDTAVYYCVRHGNFGNSYISYWAYWGQGTLVTVSSGGGGSGGGGSGGGGSQTVVTQEPSLTVSPGGTVTLTCGSSTGAVTSGNYPNWVQQKPGQAPRGLIGGTKFLAPGTPARFSGSLLGGKAALTLSGVQPEDEAEYYCVLWYSNRWVFGGGTKLTVL

SEQ ID NO: 330 - DNA, 1500 bp, synthetic construct
  misc_feature 1..1500: note = MCSP-G8 HL x I2C HL
  source 1..1500: mol_type = other DNA
caggtgcagctggtccagtctggggctgaggtgaagaggcctggggcctcaatgaaggtctcctgcaaggcttctgggtacaccttcaccaactactatatacactgggtgcgacaggcccctggacaaggtcttgagtggatgggttggatcaaccctaacagtggtgccacaaactatgcacagaagttccagggcagagtcaccatgaccagggacacgtccacgagcacagtctacatggagctgagcagcctgagatctgaggacacggccgtgtattactgtgcgaaatcctgggtctcctggtttgcttcctggggtcaaggaaccttggtcaccgtctcctcaggtggtggtggttctggcggcggcggctccggtggtggtggttctgacatcgtgatgacccagtctccagactccctgactgtgtctctgggcgagagggccaccatcaactgcaagtccagccagagtgttttaaacagcaagaacaataggaactacttagcttggtaccagcagaaaccaggacagcctcctaagctgctcatttactgggcatctacccgggaatccggggtccctgaccgattcagtggcagcgggtctgggacagatttcactctcaccatcgattccctgcagcctgaagatagtgcaacttattactgtcagcaacattatagtactccattcacttttggccaggggaccagactggagatcaaatccggaggtggtggatccgaggtgcagctggtcgagtctggaggaggattggtgcagcctggagggtcattgaaactctcatgtgcagcctctggattcaccttcaataagtacgccatgaactgggtccgccaggctccaggaaagggtttggaatgggttgctcgcataagaagtaaatataataattatgcaacatattatgccgattcagtgaaagacaggttcaccatctccagagatgattcaaaaaacactgcctatctacaaatgaacaacttgaaaactgaggacactgccgtgtactactgtgtgagacatgggaacttcggtaatagctacatatcctactgggcttactggggccaagggactctggtcaccgtctcctcaggtggtggtggttctggcggcggcggctccggtggtggtggttctcagactgttgtgactcaggaaccttcactcaccgtatcacctggtggaacagtcacactcacttgtggctcctcgactggggctgttacatctggcaactacccaaactgggtccaacaaaaaccaggtcaggcaccccgtggtctaataggtgggactaagttcctcgcccccggtactcctgccagattctcaggctccctgcttggaggcaaggctgccctcaccctctcaggggtacagccagaggatgaggcagaatattactgtgttctatggtacagcaaccgctgggtgttcggtggaggaaccaaactgactgtccta

SEQ ID NO: 331 - protein, 500 aa, synthetic construct
  REGION 1..500: note = MCSP-D5 HL x I2C HL
QVQLVQSGAEVKRPGASMKVSCKASGYTFTNYYIHWVRQAPGQGLEWMGWINPNSGATNYAQKFQGRVTMTRDTSTSTVYMELSSLRSEDTAVYYCAKSWVSWFASWGQGTLVTVSSGGGGSGGGGSGGGGSDIVMTQSPDSLAVSLGERATINCKSSQSVLNSKNNRNYLAWYQQKPGQPPKLLIYWASTRESGVPDRFSGSGSGTDFTLTIDSLQAEDSATYYCQQHYSTPFTFGQGTRLEIKSGGGGSEVQLVESGGGLVQPGGSLKLSCAASGFTFNKYAMNWVRQAPGKGLEWVARIRSKYNNYATYYADSVKDRFTISRDDSKNTAYLQMNNLKTEDTAVYYCVRHGNFGNSYISYWAYWGQGTLVTVSSGGGGSGGGGSGGGGSQTVVTQEPSLTVSPGGTVTLTCGSSTGAVTSGNYPNWVQQKPGQAPRGLIGGTKFLAPGTPARFSGSLLGGKAALTLSGVQPEDEAEYYCVLWYSNRWVFGGGTKLTVL

SEQ ID NO: 332 - DNA, 1500 bp, synthetic construct
  misc_feature 1..1500: note = MCSP-D5 HL x I2C HL
  source 1..1500: mol_type = other DNA
caggtgcagctggtccagtctggggctgaggtgaagaggcctggggcctcaatgaaggtctcctgcaaggcttctgggtacaccttcaccaactactatatacactgggtgcgacaggcccctggacaaggtcttgagtggatgggttggatcaaccctaacagtggtgccacaaactatgcacagaagttccagggcagagtcaccatgaccagggacacgtccacgagcacagtctacatggagctgagcagcctgagatctgaggacacggccgtgtattactgtgcgaaatcctgggtctcctggtttgcttcctggggtcaaggaaccttggtcaccgtctcctcaggtggtggtggttctggcggcggcggctccggtggtggtggttctgacatcgtgatgacccagtctccagactccctggctgtgtctctgggcgagagggccaccatcaactgcaagtccagccagagtgttttaaacagcaagaacaataggaactacttagcttggtaccagcagaaaccaggacagcctcctaagctgctcatttactgggcatctacccgggaatccggggtccctgaccgattcagtggcagcgggtctgggacagatttcactctcaccatcgattccctgcaggctgaagatagtgcaacttattactgtcagcaacattatagtactccattcacttttggccaggggaccagactggagatcaaatccggaggtggtggatccgaggtgcagctggtcgagtctggaggaggattggtgcagcctggagggtcattgaaactctcatgtgcagcctctggattcaccttcaataagtacgccatgaactgggtccgccaggctccaggaaagggtttggaatgggttgctcgcataagaagtaaatataataattatgcaacatattatgccgattcagtgaaagacaggttcaccatctccagagatgattcaaaaaacactgcctatctacaaatgaacaacttgaaaactgaggacactgccgtgtactactgtgtgagacatgggaacttcggtaatagctacatatcctactgggcttactggggccaagggactctggtcaccgtctcctcaggtggtggtggttctggcggcggcggctccggtggtggtggttctcagactgttgtgactcaggaaccttcactcaccgtatcacctggtggaacagtcacactcacttgtggctcctcgactggggctgttacatctggcaactacccaaactgggtccaacaaaaaccaggtcaggcaccccgtggtctaataggtgggactaagttcctcgcccccggtactcctgccagattctcaggctccctgcttggaggcaaggctgccctcaccctctcaggggtacagccagaggatgaggcagaatattactgtgttctatggtacagcaaccgctgggtgttcggtggaggaaccaaactgactgtccta

SEQ ID NO: 333 - protein, 500 aa, synthetic construct
  REGION 1..500: note = MCSP-F7 HL x I2C HL
QVQLVQSGAEVKRPGASMKVSCKASGYTFTNYYIHWVRQAPGQGLEWMGWINPNSGATNYAQKFQGRVTMTRDTSTSTVYMELSSLRSEDTAVYYCAKSWVSWFASWGQGTLVTVSSGGGGSGGGGSGGGGSDIVMTQSPDSLAVSLGERATINCKSSQSVLNSKNNRNYLAWYQQKPGQPPKLLIYWASTRESGVPDRFSGSGSGTDFTLTIDVLQPEDIATYYCQQHYSTPFTFGQGTRLEIKSGGGGSEVQLVESGGGLVQPGGSLKLSCAASGFTFNKYAMNWVRQAPGKGLEWVARIRSKYNNYATYYADSVKDRFTISRDDSKNTAYLQMNNLKTEDTAVYYCVRHGNFGNSYISYWAYWGQGTLVTVSSGGGGSGGGGSGGGGSQTVVTQEPSLTVSPGGTVTLTCGSSTGAVTSGNYPNWVQQKPGQAPRGLIGGTKFLAPGTPARFSGSLLGGKAALTLSGVQPEDEAEYYCVLWYSNRWVFGGGTKLTVL

SEQ ID NO: 334 - DNA, 1500 bp, synthetic construct
  misc_feature 1..1500: note = MCSP-F7 HL x I2C HL
  source 1..1500: mol_type = other DNA
caggtgcagctggtccagtctggggctgaggtgaagaggcctggggcctcaatgaaggtctcctgcaaggcttctgggtacaccttcaccaactactatatacactgggtgcgacaggcccctggacaaggtcttgagtggatgggttggatcaaccctaacagtggtgccacaaactatgcacagaagttccagggcagagtcaccatgaccagggacacgtccacgagcacagtctacatggagctgagcagcctgagatctgaggacacggccgtgtattactgtgcgaaatcctgggtctcctggtttgcttcctggggtcaaggaaccttggtcaccgtctcctcaggtggtggtggttctggcggcggcggctccggtggtggtggttctgacatcgtgatgacccagtctccagactccctggctgtgtctctgggcgagagggccaccatcaactgcaagtccagccagagtgttttaaacagcaagaacaataggaactacttagcttggtaccagcagaaaccaggacagcctcctaagctgctcatttactgggcatctacccgggaatccggggtccctgaccgattcagtggcagcgggtctgggacagatttcactctcaccatcgatgtcctgcagcctgaagatattgcaacttattactgtcagcaacattatagtactccattcacttttggccaggggaccagactggagatcaaatccggaggtggtggatccgaggtgcagctggtcgagtctggaggaggattggtgcagcctggagggtcattgaaactctcatgtgcagcctctggattcaccttcaataagtacgccatgaactgggtccgccaggctccaggaaagggtttggaatgggttgctcgcataagaagtaaatataataattatgcaacatattatgccgattcagtgaaagacaggttcaccatctccagagatgattcaaaaaacactgcctatctacaaatgaacaacttgaaaactgaggacactgccgtgtactactgtgtgagacatgggaacttcggtaatagctacatatcctactgggcttactggggccaagggactctggtcaccgtctcctcaggtggtggtggttctggcggcggcggctccggtggtggtggttctcagactgttgtgactcaggaaccttcactcaccgtatcacctggtggaacagtcacactcacttgtggctcctcgactggggctgttacatctggcaactacccaaactgggtccaacaaaaaccaggtcaggcaccccgtggtctaataggtgggactaagttcctcgcccccggtactcctgccagattctcaggctccctgcttggaggcaaggctgccctcaccctctcaggggtacagccagaggatgaggcagaatattactgtgttctatggtacagcaaccgctgggtgttcggtggaggaaccaaactgactgtccta

SEQ ID NO: 335 - protein, 500 aa, synthetic construct
  REGION 1..500: note = MCSP-G5 HL x I2C HL
QVQLVQSGAEVKRPGASMKVSCKASGYTFTNYYIHWVRQAPGQGLEWMGWINPNSGATNYAQKFQGRVTMTRDTSTSTVYMELSSLRSEDTAVYYCAKSWVSWFASWGQGTLVTVSSGGGGSGGGGSGGGGSDIVMTQSPDSLAVSLGDRATINCKSSQSVLNSKNNRNYLAWYQQKPGQPPKLLIYWASTRESGVPDRFSGSGSGTDFTLTIDSLQPEDSATYYCQQHYSTPFTFGQGTRLEIKSGGGGSEVQLVESGGGLVQPGGSLKLSCAASGFTFNKYAMNWVRQAPGKGLEWVARIRSKYNNYATYYADSVKDRFTISRDDSKNTAYLQMNNLKTEDTAVYYCVRHGNFGNSYISYWAYWGQGTLVTVSSGGGGSGGGGSGGGGSQTVVTQEPSLTVSPGGTVTLTCGSSTGAVTSGNYPNWVQQKPGQAPRGLIGGTKFLAPGTPARFSGSLLGGKAALTLSGVQPEDEAEYYCVLWYSNRWVFGGGTKLTVL

SEQ ID NO: 336 - DNA, 1500 bp, synthetic construct
  misc_feature 1..1500: note = MCSP-G5 HL x I2C HL
  source 1..1500: mol_type = other DNA
caggtgcagctggtccagtctggggctgaggtgaagaggcctggggcctcaatgaaggtctcctgcaaggcttctgggtacaccttcaccaactactatatacactgggtgcgacaggcccctggacaaggtcttgagtggatgggttggatcaaccctaacagtggtgccacaaactatgcacagaagttccagggcagagtcaccatgaccagggacacgtccacgagcacagtctacatggagctgagcagcctgagatctgaggacacggccgtgtattactgtgcgaaatcctgggtctcctggtttgcttcctggggtcaaggaaccttggtcaccgtctcctcaggtggtggtggttctggcggcggcggctccggtggtggtggttctgacatcgtgatgacccagtctccagactccctggctgtgtctctgggcgacagggccaccatcaactgcaagtccagccagagtgttttaaacagcaagaacaataggaactacttagcttggtaccagcagaaaccaggacagcctcctaagctgctcatttactgggcatctacccgggaatccggggtccctgaccgattcagtggcagcgggtctgggacagatttcactctcaccatcgattccctgcagcctgaggatagtgcaacttattactgtcagcaacattatagtactccattcacttttggccaggggaccagactggagatcaaatccggaggtggtggatccgaggtgcagctggtcgagtctggaggaggattggtgcagcctggagggtcattgaaactctcatgtgcagcctctggattcaccttcaataagtacgccatgaactgggtccgccaggctccaggaaagggtttggaatgggttgctcgcataagaagtaaatataataattatgcaacatattatgccgattcagtgaaagacaggttcaccatctccagagatgattcaaaaaacactgcctatctacaaatgaacaacttgaaaactgaggacactgccgtgtactactgtgtgagacatgggaacttcggtaatagctacatatcctactgggcttactggggccaagggactctggtcaccgtctcctcaggtggtggtggttctggcggcggcggctccggtggtggtggttctcagactgttgtgactcaggaaccttcactcaccgtatcacctggtggaacagtcacactcacttgtggctcctcgactggggctgttacatctggcaactacccaaactgggtccaacaaaaaccaggtcaggcaccccgtggtctaataggtgggactaagttcctcgcccccggtactcctgccagattctcaggctccctgcttggaggcaaggctgccctcaccctctcaggggtacagccagaggatgaggcagaatattactgtgttctatggtacagcaaccgctgggtgttcggtggaggaaccaaactgactgtccta

SEQ ID NO: 337 - protein, 500 aa, synthetic construct
  REGION 1..500: note = MCSP-F8 HL x I2C HL
QVQLVQSGAEVKRPGASMKVSCKASGYTFTNYYIHWVRQAPGQGLEWMGWINPNSGATNYAQKFQGRVTMTRDTSTSTVYMELSSLRSEDTAVYYCAKSWVSWFASWGQGTLVTVSSGGGGSGGGGSGGGGSDIVMTQSPDSLTVSLGERATINCKSSQSVLNSKNNRNYLAWYQQKPGQPPKLLIYWASTRESGVPDRFSGSGSGTDFTLTIDSLQAEDSAIYYCQQHYSTPFTFGQGTRLEIKSGGGGSEVQLVESGGGLVQPGGSLKLSCAASGFTFNKYAMNWVRQAPGKGLEWVARIRSKYNNYATYYADSVKDRFTISRDDSKNTAYLQMNNLKTEDTAVYYCVRHGNFGNSYISYWAYWGQGTLVTVSSGGGGSGGGGSGGGGSQTVVTQEPSLTVSPGGTVTLTCGSSTGAVTSGNYPNWVQQKPGQAPRGLIGGTKFLAPGTPARFSGSLLGGKAALTLSGVQPEDEAEYYCVLWYSNRWVFGGGTKLTVL

SEQ ID NO: 338 - DNA, 1500 bp, synthetic construct
  misc_feature 1..1500: note = MCSP-F8 HL x I2C HL
  source 1..1500: mol_type = other DNA
caggtgcagctggtccagtctggggctgaggtgaagaggcctggggcctcaatgaaggtctcctgcaaggcttctgggtacaccttcaccaactactatatacactgggtgcgacaggcccctggacaaggtcttgagtggatgggttggatcaaccctaacagtggtgccacaaactatgcacagaagttccagggcagagtcaccatgaccagggacacgtccacgagcacagtctacatggagctgagcagcctgagatctgaggacacggccgtgtattactgtgcgaaatcctgggtctcctggtttgcttcctggggtcaaggaaccttggtcaccgtctcctcaggtggtggtggttctggcggcggcggctccggtggtggtggttctgacatcgtgatgacccagtctccagactccctgactgtgtctctgggcgagagggccaccatcaactgcaagtccagccagagtgttttaaacagcaagaacaataggaactacttagcttggtaccagcagaaaccaggacagcctcctaagctgctcatttactgggcatctacccgggaatccggggtccctgaccgattcagtggcagcgggtctgggacagatttcactctcaccatcgattccctgcaggctgaagatagtgcaatttattactgtcagcaacattatagtactccattcacttttggccaggggaccagactggagatcaaatccggaggtggtggatccgaggtgcagctggtcgagtctggaggaggattggtgcagcctggagggtcattgaaactctcatgtgcagcctctggattcaccttcaataagtacgccatgaactgggtccgccaggctccaggaaagggtttggaatgggttgctcgcataagaagtaaatataataattatgcaacatattatgccgattcagtgaaagacaggttcaccatctccagagatgattcaaaaaacactgcctatctacaaatgaacaacttgaaaactgaggacactgccgtgtactactgtgtgagacatgggaacttcggtaatagctacatatcctactgggcttactggggccaagggactctggtcaccgtctcctcaggtggtggtggttctggcggcggcggctccggtggtggtggttctcagactgttgtgactcaggaaccttcactcaccgtatcacctggtggaacagtcacactcacttgtggctcctcgactggggctgttacatctggcaactacccaaactgggtccaacaaaaaccaggtcaggcaccccgtggtctaataggtgggactaagttcctcgcccccggtactcctgccagattctcaggctccctgcttggaggcaaggctgccctcaccctctcaggggtacagccagaggatgaggcagaatattactgtgttctatggtacagcaaccgctgggtgttcggtggaggaaccaaactgactgtccta

SEQ ID NO: 339 - protein, 500 aa, synthetic construct
  REGION 1..500: note = MCSP-G10 HL x I2C HL
QVQLVQSGAEVKRPGASMKVSCKASGYTFTNYYIHWVRQAPGQGLEWMGWINPNSGATNYAQKFQGRVTMTRDTSTSTVYMELSSLRSEDTAVYYCAKSWVSWFASWGQGTLVTVSSGGGGSGGGGSGGGGSDIVMTQSPDSLAVSLGERATINCKSSQSVLSSSNNKNYLNWYQQKPGQPPKLLIYWASTRESGVPDRFSGSGSGTDFTLTISSLQAEDVAVYYCQQHFNTPFAFGQGTKLEIKSGGGGSEVQLVESGGGLVQPGGSLKLSCAASGFTFNKYAMNWVRQAPGKGLEWVARIRSKYNNYATYYADSVKDRFTISRDDSKNTAYLQMNNLKTEDTAVYYCVRHGNFGNSYISYWAYWGQGTLVTVSSGGGGSGGGGSGGGGSQTVVTQEPSLTVSPGGTVTLTCGSSTGAVTSGNYPNWVQQKPGQAPRGLIGGTKFLAPGTPARFSGSLLGGKAALTLSGVQPEDEAEYYCVLWYSNRWVFGGGTKLTVL

SEQ ID NO: 340 - DNA, 1500 bp, synthetic construct
  misc_feature 1..1500: note = MCSP-G10 HL x I2C HL
  source 1..1500: mol_type = other DNA
caggtgcagctggtccagtctggggctgaggtgaagaggcctggggcctcaatgaaggtctcctgcaaggcttctgggtacaccttcaccaactactatatacactgggtgcgacaggcccctggacaaggtcttgagtggatgggttggatcaaccctaacagtggtgccacaaactatgcacagaagttccagggcagagtcaccatgaccagggacacgtccacgagcacagtctacatggagctgagcagcctgagatctgaggacacggccgtgtattactgtgcgaaatcctgggtctcctggtttgcttcctggggtcaaggaaccttggtcaccgtctcctcaggtggtggtggttctggcggcggcggctccggtggtggtggttctgacatcgtgatgacacagtctccagactccctggctgtgtctctgggcgagagggccaccatcaactgcaagtccagccagagtgtcttatccagctccaacaataagaactacttaaattggtaccagcagaaaccaggacagcctcctaagttgctcatttactgggcatctacccgggaatccggggtccctgaccgattcagtggcagcgggtctgggacagatttcactctcaccatcagcagcctgcaggctgaagatgtggcggtttattactgtcaacaacattttaatactccgttcgcttttggccaggggaccaagctggagatcaaatccggaggtggtggatccgaggtgcagctggtcgagtctggaggaggattggtgcagcctggagggtcattgaaactctcatgtgcagcctctggattcaccttcaataagtacgccatgaactgggtccgccaggctccaggaaagggtttggaatgggttgctcgcataagaagtaaatataataattatgcaacatattatgccgattcagtgaaagacaggttcaccatctccagagatgattcaaaaaacactgcctatctacaaatgaacaacttgaaaactgaggacactgccgtgtactactgtgtgagacatgggaacttcggtaatagctacatatcctactgggcttactggggccaagggactctggtcaccgtctcctcaggtggtggtggttctggcggcggcggctccggtggtggtggttctcagactgttgtgactcaggaaccttcactcaccgtatcacctggtggaacagtcacactcacttgtggctcctcgactggggctgttacatctggcaactacccaaactgggtccaacaaaaaccaggtcaggcaccccgtggtctaataggtgggactaagttcctcgcccccggtactcctgccagattctcaggctccctgcttggaggcaaggctgccctcaccctctcaggggtacagccagaggatgaggcagaatattactgtgttctatggtacagcaaccgctgggtgttcggtggaggaaccaaactgactgtccta

SEQ ID NO: 341 - protein, 8 aa, Homo sapiens
QDGNEEMG

SEQ ID NO: 342 - protein, 8 aa, Saimiri sciureus
QDGNEEIG

SEQ ID NO: 343 - DNA, 20 bp, synthetic construct
  misc_feature 1..20: note = Thioate-modified CpG-Oligonucleotide
  source 1..20: mol_type = other DNA
tccatgacgttcctgatgct

SEQ ID NO: 344 - DNA, 28 bp, synthetic construct
  misc_feature 1..28: note = MVH1
  source 1..28: mol_type = other DNA
gcaggtgcagctcgaggagtcaggacct

SEQ ID NO: 345 - DNA, 27 bp, synthetic construct
  misc_feature 1..27: note = MVH2
  source 1..27: mol_type = other DNA
gaggtccagctcgagcagtctggacct

SEQ ID NO: 346 - DNA, 27 bp, synthetic construct
  misc_feature 1..27: note = MVH3
  source 1..27: mol_type = other DNA
caggtccaactcgagcagcctggggct

SEQ ID NO: 347 - DNA, 27 bp, synthetic construct
  misc_feature 1..27: note = MVH4
  source 1..27: mol_type = other DNA
gaggttcagctcgagcagtctggggca

SEQ ID NO: 348 - DNA, 28 bp, synthetic construct
  misc_feature 1..28: note = MVH5
  source 1..28: mol_type = other DNA
gaaggtgaagctcgaggagtctggagga

SEQ ID NO: 349 - DNA, 27 bp, synthetic construct
  misc_feature 1..27: note = MVH6
  source 1..27: mol_type = other DNA
gaggtgaagcttctcgagtctggaggt

SEQ ID NO: 350 - DNA, 27 bp, synthetic construct
  misc_feature 1..27: note = MVH7
  source 1..27: mol_type = other DNA
gaagtgaagctcgaggagtctggggga

SEQ ID NO: 351 - DNA, 27 bp, synthetic construct
  misc_feature 1..27: note = MVH8
  source 1..27: mol_type = other DNA
gaggttcagctcgagcagtctggagct

SEQ ID NO: 352 - DNA, 34 bp, synthetic construct
  misc_feature 1..34: note = MuVHBstEII
  source 1..34: mol_type = other DNA
tgaggagacggtgaccgtggtcccttggccccag

SEQ ID NO: 353 - DNA, 32 bp, synthetic construct
  misc_feature 1..32: note = MUVK1
  source 1..32: mol_type = other DNA
ccagttccgagctcgttgtgactcaggaatct

SEQ ID NO: 354 - DNA, 32 bp, synthetic construct
  misc_feature 1..32: note = MUVK2
  source 1..32: mol_type = other DNA
ccagttccgagctcgtgttgacgcagccgccc

SEQ ID NO: 355 - DNA, 32 bp, synthetic construct
  misc_feature 1..32: note = MUVK3
  source 1..32: mol_type = other DNA
ccagttccgagctcgtgctcacccagtctcca

SEQ ID NO: 356 - DNA, 32 bp, synthetic construct
  misc_feature 1..32: note = MUVK4
  source 1..32: mol_type = other DNA
ccagttccgagctccagatgacccagtctcca

SEQ ID NO: 357 - DNA, 32 bp, synthetic construct
  misc_feature 1..32: note = MUVK5
  source 1..32: mol_type = other DNA
ccagatgtgagctcgtgatgacccagactcca

SEQ ID NO: 358 - DNA, 32 bp, synthetic construct
  misc_feature 1..32: note = MUVK6
  source 1..32: mol_type = other DNA
ccagatgtgagctcgtcatgacccagtctcca

SEQ ID NO: 359 - DNA, 32 bp, synthetic construct
  misc_feature 1..32: note = MUVK7
  source 1..32: mol_type = other DNA
ccagttccgagctcgtgatgacacagtctcca

SEQ ID NO: 360 - DNA, 39 bp, synthetic construct
  misc_feature 1..39: note = MuVkHindIII/BsiW1
  source 1..39: mol_type = other DNA
tggtgcactagtcgtacgtttgatctcaagcttggtccc

SEQ ID NO: 361 - DNA, 22 bp, synthetic construct
  misc_feature 1..22: note = forward primer
  source 1..22: mol_type = other DNA
gatctggtctacaccatcgagc

SEQ ID NO: 362 - DNA, 24 bp, synthetic construct
  misc_feature 1..24: note = reverse primer
  source 1..24: mol_type = other DNA
ggagctgctgctggctcagtgagg

SEQ ID NO: 363 - DNA, 23 bp, synthetic construct
  misc_feature 1..23: note = forward primer
  source 1..23: mol_type = other DNA
ttccagctgagcatgtctgatgg

SEQ ID NO: 364 - DNA, 21 bp, synthetic construct
  misc_feature 1..21: note = reverse primer
  source 1..21: mol_type = other DNA
cgatcagcatctgggcccagg

SEQ ID NO: 365 - DNA, 25 bp, synthetic construct
  misc_feature 1..25: note = forward primer
  source 1..25: mol_type = other DNA
gtggagcagttcactcagcaggacc

SEQ ID NO: 366 - DNA, 22 bp, synthetic construct
  misc_feature 1..22: note = reverse primer
  source 1..22: mol_type = other DNA
gccttcacacccagtactggcc

SEQ ID NO: 367 - DNA, 59 bp, synthetic construct
  misc_feature 1..59: note = forward primer
  source 1..59: mol_type = other DNA
tcccgtacgagatctggatcccaattggatggcggactcgtgctgttctcacacagagg

SEQ ID NO: 368 - DNA, 45 bp, synthetic construct
  misc_feature 1..45: note = reverse primer
  source 1..45: mol_type = other DNA
agtgggtcgactcacacccagtactggccattcttaagggcaggg

SEQ ID NO: 369 - DNA, 64 bp, synthetic construct
  misc_feature 1..64: note = forward primer
  source 1..64: mol_type = other DNA
gaggaattcaccatgccgctgctgctactgctgcccctgctgtgggcaggggccctggctatgg

SEQ ID NO: 370 - DNA, 26 bp, synthetic construct
  misc_feature 1..26: note = reverse primer
  source 1..26: mol_type = other DNA
gatttgtaactgtatttggtacttcc

SEQ ID NO: 371 - DNA, 21 bp, synthetic construct
  misc_feature 1..21: note = forward primer
  source 1..21: mol_type = other DNA
attccgcctccttggggatcc

SEQ ID NO: 372 - DNA, 25 bp, synthetic construct
  misc_feature 1..25: note = reverse primer
  source 1..25: mol_type = other DNA
gcataggagacattgagctggatgg

SEQ ID NO: 373 - DNA, 21 bp, synthetic construct
  misc_feature 1..21: note = forward primer
  source 1..21: mol_type = other DNA
gcaccaacctgacctgtcagg

SEQ ID NO: 374 - DNA, 39 bp, synthetic construct
  misc_feature 1..39: note = reverse primer
  source 1..39: mol_type = other DNA
agtgggtcgactcactgggtcctgacctctgagtattcg

SEQ ID NO: 375 - protein, 106 aa, synthetic construct
  REGION 1..106: note = PSCA-1 VL
DIQLTQSPSSLSASVGDRVTITCSASSSVRFIHWYQQKPGKAPKRLIYDTSKLASGVPSRFSGSGSGTDFTLTISSLQPEDFATYYCQQWSSSPFTFGQGTKVEIK

SEQ ID NO: 376 - DNA, 318 bp, synthetic construct
  misc_feature 1..318: note = PSCA-1 VL
  source 1..318: mol_type = other DNA
gacatccagctgacccagagcccatccagcctgtctgctagcgtgggcgacagagtgaccatcacctgcagcgccagcagcagcgtgcggttcatccactggtatcagcagaagcccggcaaggcccccaagaggctgatctacgacaccagcaagctggctagcggcgtgccaagcagattcagcggcagcggctccggcaccgacttcaccctgaccatcagcagcctgcagccagaggacttcgctacctattactgccagcagtggagcagcagccccttcaccttcggccagggcaccaaggtggagatcaag

SEQ ID NO: 377 - protein, 10 aa, synthetic construct
  REGION 1..10: note = PSCA-1 LCDR1
SASSSVRFIH

SEQ ID NO: 378 - protein, 7 aa, synthetic construct
  REGION 1..7: note = PSCA-1 LCDR2
DTSKLAS

SEQ ID NO: 379 - protein, 9 aa, synthetic construct
  REGION 1..9: note = PSCA-1 LCDR3
QQWSSSPFT

SEQ ID NO: 380 - protein, 112 aa, synthetic construct
  REGION 1..112: note = PSCA-1 H
EVQLVESGGGLVQPGGSLRLSCAASGFNIKDYYIHWVRQAPGKGLEWVAWIDPENGDTEFVPKFQGRATISADTSKNTAYLQMNSLRAEDTAVYYCKTGGFWGQGTLVTVSS

SEQ ID NO: 381 - DNA, 336 bp, synthetic construct
  misc_feature 1..336: note = PSCA-1 H
  source 1..336: mol_type = other DNA
gaggtgcagctggtcgagtctggcggaggactggtgcagccaggcggctccctgagactgagctgcgccgccagcggcttcaacatcaaggactactacatccactgggtccggcaggctccaggcaagggactggaatgggtggcctggatcgacccagagaacggcgacaccgagttcgtgcccaagttccagggcagagccaccatcagcgccgacacctccaagaacaccgcctacctgcagatgaacagcctgagggccgaggacaccgccgtgtactactgcaagaccggcggcttctggggacagggcaccctggtcaccgtgtcctcc

SEQ ID NO: 382 - protein, 5 aa, synthetic construct
  REGION 1..5: note = PSCA-1 HCDR1
DYYIH

SEQ ID NO: 383 - protein, 17 aa, synthetic construct
  REGION 1..17: note = PSCA-1 HCDR2
WIDPENGDTEFVPKFQG

SEQ ID NO: 384 - skipped

SEQ ID NO: 385 - protein, 233 aa, synthetic construct
  REGION 1..233: note = PSCA-1 HL
EVQLVESGGGLVQPGGSLRLSCAASGFNIKDYYIHWVRQAPGKGLEWVAWIDPENGDTEFVPKFQGRATISADTSKNTAYLQMNSLRAEDTAVYYCKTGGFWGQGTLVTVSSGGGGSGGGGSGGGGSDIQLTQSPSSLSASVGDRVTITCSASSSVRFIHWYQQKPGKAPKRLIYDTSKLASGVPSRFSGSGSGTDFTLTISSLQPEDFATYYCQQWSSSPFTFGQGTKVEIK

SEQ ID NO: 386 - DNA, 699 bp, synthetic construct
  misc_feature 1..699: note = PSCA-1 HL
  source 1..699: mol_type = other DNA
gaggtgcagctggtcgagtctggcggaggactggtgcagccaggcggctccctgagactgagctgcgccgccagcggcttcaacatcaaggactactacatccactgggtccggcaggctccaggcaagggactggaatgggtggcctggatcgacccagagaacggcgacaccgagttcgtgcccaagttccagggcagagccaccatcagcgccgacacctccaagaacaccgcctacctgcagatgaacagcctgagggccgaggacaccgccgtgtactactgcaagaccggcggcttctggggacagggcaccctggtcaccgtgtcctccggtggtggtggttctggcggcggcggctccggtggtggtggttctgacatccagctgacccagagcccatccagcctgtctgctagcgtgggcgacagagtgaccatcacctgcagcgccagcagcagcgtgcggttcatccactggtatcagcagaagcccggcaaggcccccaagaggctgatctacgacaccagcaagctggctagcggcgtgccaagcagattcagcggcagcggctccggcaccgacttcaccctgaccatcagcagcctgcagccagaggacttcgctacctattactgccagcagtggagcagcagccccttcaccttcggccagggcaccaaggtggagatcaag

SEQ ID NO: 387 - protein, 233 aa, synthetic construct
  REGION 1..233: note = PSCA-1 LH
DIQLTQSPSSLSASVGDRVTITCSASSSVRFIHWYQQKPGKAPKRLIYDTSKLASGVPSRFSGSGSGTDFTLTISSLQPEDFATYYCQQWSSSPFTFGQGTKVEIKGGGGSGGGGSGGGGSEVQLVESGGGLVQPGGSLRLSCAASGFNIKDYYIHWVRQAPGKGLEWVAWIDPENGDTEFVPKFQGRATISADTSKNTAYLQMNSLRAEDTAVYYCKTGGFWGQGTLVTVSS

SEQ ID NO: 388 - DNA, 699 bp, synthetic construct
  misc_feature 1..699: note = PSCA-1 LH
  source 1..699: mol_type = other DNA
gacatccagctgacccagagcccatccagcctgtctgctagcgtgggcgacagagtgaccatcacctgcagcgccagcagcagcgtgcggttcatccactggtatcagcagaagcccggcaaggcccccaagaggctgatctacgacaccagcaagctggctagcggcgtgccaagcagattcagcggcagcggctccggcaccgacttcaccctgaccatcagcagcctgcagccagaggacttcgctacctattactgccagcagtggagcagcagccccttcaccttcggccagggcaccaaggtggagatcaagggtggtggtggttctggcggcggcggctccggtggtggtggttctgaggtgcagctggtcgagtctggcggaggactggtgcagccaggcggctccctgagactgagctgcgccgccagcggcttcaacatcaaggactactacatccactgggtccggcaggctccaggcaagggactggaatgggtggcctggatcgacccagagaacggcgacaccgagttcgtgcccaagttccagggcagagccaccatcagcgccgacacctccaagaacaccgcctacctgcagatgaacagcctgagggccgaggacaccgccgtgtactactgcaagaccggcggcttctggggacagggcaccctggtcaccgtgtcctcc

SEQ ID NO: 389 - protein, 488 aa, synthetic construct
  REGION 1..488: note = PSCA-1 HL x I2C HL
EVQLVESGGGLVQPGGSLRLSCAASGFNIKDYYIHWVRQAPGKGLEWVAWIDPENGDTEFVPKFQGRATISADTSKNTAYLQMNSLRAEDTAVYYCKTGGFWGQGTLVTVSSGGGGSGGGGSGGGGSDIQLTQSPSSLSASVGDRVTITCSASSSVRFIHWYQQKPGKAPKRLIYDTSKLASGVPSRFSGSGSGTDFTLTISSLQPEDFATYYCQQWSSSPFTFGQGTKVEIKSGGGGSEVQLVESGGGLVQPGGSLKLSCAASGFTFNKYAMNWVRQAPGKGLEWVARIRSKYNNYATYYADSVKDRFTISRDDSKNTAYLQMNNLKTEDTAVYYCVRHGNFGNSYISYWAYWGQGTLVTVSSGGGGSGGGGSGGGGSQTVVTQEPSLTVSPGGTVTLTCGSSTGAVTSGNYPNWVQQKPGQAPRGLIGGTKFLAPGTPARFSGSLLGGKAALTLSGVQPEDEAEYYCVLWYSNRWVFGGGTKLTVL

SEQ ID NO: 390 - DNA, 1464 bp, synthetic construct
  misc_feature 1..1464: note = PSCA-1 HL x I2C HL
  source 1..1464: mol_type = other DNA
gaggtgcagctggtcgagtctggcggaggactggtgcagccaggcggctccctgagactgagctgcgccgccagcggcttcaacatcaaggactactacatccactgggtccggcaggctccaggcaagggactggaatgggtggcctggatcgacccagagaacggcgacaccgagttcgtgcccaagttccagggcagagccaccatcagcgccgacacctccaagaacaccgcctacctgcagatgaacagcctgagggccgaggacaccgccgtgtactactgcaagaccggcggcttctggggacagggcaccctggtcaccgtgtcctccggtggtggtggttctggcggcggcggctccggtggtggtggttctgacatccagctgacccagagcccatccagcctgtctgctagcgtgggcgacagagtgaccatcacctgcagcgccagcagcagcgtgcggttcatccactggtatcagcagaagcccggcaaggcccccaagaggctgatctacgacaccagcaagctggctagcggcgtgccaagcagattcagcggcagcggctccggcaccgacttcaccctgaccatcagcagcctgcagccagaggacttcgctacctattactgccagcagtggagcagcagccccttcaccttcggccagggcaccaaggtggagatcaagtccggaggtggtggatccgaggtgcagctggtcgagtctggaggaggattggtgcagcctggagggtcattgaaactctcatgtgcagcctctggattcaccttcaataagtacgccatgaactgggtccgccaggctccaggaaagggtttggaatgggttgctcgcataagaagtaaatataataattatgcaacatattatgccgattcagtgaaagacaggttcaccatctccagagatgattcaaaaaacactgcctatctacaaatgaacaacttgaaaactgaggacactgccgtgtactactgtgtgagacatgggaacttcggtaatagctacatatcctactgggcttactggggccaagggactctggtcaccgtctcctcaggtggtggtggttctggcggcggcggctccggtggtggtggttctcagactgttgtgactcaggaaccttcactcaccgtatcacctggtggaacagtcacactcacttgtggctcctcgactggggctgttacatctggcaactacccaaactgggtccaacaaaaaccaggtcaggcaccccgtggtctaataggtgggactaagttcctcgcccccggtactcctgccagattctcaggctccctgcttggaggcaaggctgccctcaccctctcaggggtacagccagaggatgaggcagaatattactgtgttctatggtacagcaaccgctgggtgttcggtggaggaaccaaactgactgtccta

SEQ ID NO: 391 - protein, 487 aa, synthetic construct
  REGION 1..487: note = PSCA-1 LH x I2C HL
DIQLTQSPSSLSASVGDRVTITCSASSSVRFIHWYQQKPGKAPKRLIYDTSKLASGVPSRFSGSGSGTDFTLTISSLQPEDFATYYCQQWSSSPFTFGQGTKVEIKGGGGSGGGGSGGGGSEVQLVESGGGLVQPGGSLRLSCAASGFNIKDYYIHWVRQAPGKGLEWVAWIDPENGDTEFVPKFQGRATISADTSKNTAYLQMNSLRAEDTAVYYCKTGGFWGQGTLVTVSSGGGGSEVQLVESGGGLVQPGGSLKLSCAASGFTFNKYAMNWVRQAPGKGLEWVARIRSKYNNYATYYADSVKDRFTISRDDSKNTAYLQMNNLKTEDTAVYYCVRHGNFGNSYISYWAYWGQGTLVTVSSGGGGSGGGGSGGGGSQTVVTQEPSLTVSPGGTVTLTCGSSTGAVTSGNYPNWVQQKPGQAPRGLIGGTKFLAPGTPARFSGSLLGGKAALTLSGVQPEDEAEYYCVLWYSNRWVFGGGTKLTVL

SEQ ID NO: 392 - DNA, 1461 bp, synthetic construct
  misc_feature 1..1461: note = PSCA-1 LH x I2C HL
  source 1..1461: mol_type = other DNA
gacatccagctgacccagagcccatccagcctgtctgctagcgtgggcgacagagtgaccatcacctgcagcgccagcagcagcgtgcggttcatccactggtatcagcagaagcccggcaaggcccccaagaggctgatctacgacaccagcaagctggctagcggcgtgccaagcagattcagcggcagcggctccggcaccgacttcaccctgaccatcagcagcctgcagccagaggacttcgctacctattactgccagcagtggagcagcagccccttcaccttcggccagggcaccaaggtggagatcaagggtggtggtggttctggcggcggcggctccggtggtggtggttctgaggtgcagctggtcgagtctggcggaggactggtgcagccaggcggctccctgagactgagctgcgccgccagcggcttcaacatcaaggactactacatccactgggtccggcaggctccaggcaagggactggaatgggtggcctggatcgacccagagaacggcgacaccgagttcgtgcccaagttccagggcagagccaccatcagcgccgacacctccaagaacaccgcctacctgcagatgaacagcctgagggccgaggacaccgccgtgtactactgcaagaccggcggcttctggggacagggcaccctggtcaccgtgtcctccggaggtggtggatccgaggtgcagctggtcgagtctggaggaggattggtgcagcctggagggtcattgaaactctcatgtgcagcctctggattcaccttcaataagtacgccatgaactgggtccgccaggctccaggaaagggtttggaatgggttgctcgcataagaagtaaatataataattatgcaacatattatgccgattcagtgaaagacaggttcaccatctccagagatgattcaaaaaacactgcctatctacaaatgaacaacttgaaaactgaggacactgccgtgtactactgtgtgagacatgggaacttcggtaatagctacatatcctactgggcttactggggccaagggactctggtcaccgtctcctcaggtggtggtggttctggcggcggcggctccggtggtggtggttctcagactgttgtgactcaggaaccttcactcaccgtatcacctggtggaacagtcacactcacttgtggctcctcgactggggctgttacatctggcaactacccaaactgggtccaacaaaaaccaggtcaggcaccccgtggtctaataggtgggactaagttcctcgcccccggtactcctgccagattctcaggctccctgcttggaggcaaggctgccctcaccctctcaggggtacagccagaggatgaggcagaatattactgtgttctatggtacagcaaccgctgggtgttcggtggaggaaccaaactgactgtccta

SEQ ID NO: 393 - protein, 112 aa, synthetic construct
  REGION 1..112: note = PSCA-2 VL
DIVMTQAAPSVPVTPGESVSISCRSSKSLLHSNGNTYLYWFLQRPGQSPQLLIYRMSNLASGVPDRFSGSGSGTAFTLRISRVEAEDVGVYYCLQHLEYPYTFGGGTKLELK

SEQ ID NO: 394 - DNA, 336 bp, synthetic construct
  misc_feature 1..336: note = PSCA-2 VL
  source 1..336: mol_type = other DNA
gacatcgtgatgacccaggccgctccaagcgtgccagtgaccccaggcgagagcgtgtccatcagctgcaggtccagcaagagcctgctgcacagcaacggcaacacctacctgtactggtttctgcagaggccaggccagagcccccagctgctgatctacaggatgagcaacctggctagcggcgtgccagacagattcagcggcagcggctctggaaccgccttcaccctgaggatcagcagggtggaggccgaggacgtgggcgtgtactactgcctgcagcacctggaatacccctacaccttcggcggagggaccaagctggaactgaag

SEQ ID NO: 395 - protein, 16 aa, synthetic construct
  REGION 1..16: note = PSCA-2 LCDR1
RSSKSLLHSNGNTYLY

SEQ ID NO: 396 - protein, 7 aa, synthetic construct
  REGION 1..7: note = PSCA-2 LCDR2
RMSNLAS

SEQ ID NO: 397 - protein, 9 aa, synthetic construct
  REGION 1..9: note = PSCA-2 LCDR3
LQHLEYPYT

SEQ ID NO: 398 - protein, 117 aa, synthetic construct
  REGION 1..117: note = PSCA-2 H
QVQVQQPGAELVKPGAPVKLSCKASGYTFTNYWLNWVKQRPGRGLEWIGRIDPSDSEIHYDQKFKDKATLTVDKSSSTAYIQLSSLTSEDSAVYYCALTGIYAMAYWGQGTSVTVSS

SEQ ID NO: 399 - DNA, 351 bp, synthetic construct
  misc_feature 1..351: note = PSCA-2 H
  source 1..351: mol_type = other DNA
caggtgcaggtgcagcagccaggcgccgaactggtcaagcctggcgccccagtgaagctgtcctgcaaggccagcggctacaccttcaccaactactggctgaactgggtgaaacagaggcccggcaggggcctggaatggatcggcaggatcgaccccagcgacagcgagatccactacgaccagaagttcaaggacaaggccaccctgaccgtggacaagagcagcagcaccgcctacatccagctgtccagcctgaccagcgaggacagcgccgtgtactattgcgccctgaccggcatctacgccatggcctactggggccagggcaccagcgtgaccgtgtcttcc

SEQ ID NO: 400 - protein, 5 aa, synthetic construct
  REGION 1..5: note = PSCA-2 HCDR1
NYWLN

SEQ ID NO: 401 - protein, 17 aa, synthetic construct
  REGION 1..17: note = PSCA-2 HCDR2
RIDPSDSEIHYDQKFKD

SEQ ID NO: 402 - protein, 8 aa, synthetic construct
  REGION 1..8: note = PSCA-2 HCDR3
TGIYAMAY

SEQ ID NO: 403 - protein, 244 aa, synthetic construct
  REGION 1..244: note = PSCA-2 LH
DIVMTQAAPSVPVTPGESVSISCRSSKSLLHSNGNTYLYWFLQRPGQSPQLLIYRMSNLASGVPDRFSGSGSGTAFTLRISRVEAEDVGVYYCLQHLEYPYTFGGGTKLELKGGGGSGGGGSGGGGSQVQVQQPGAELVKPGAPVKLSCKASGYTFTNYWLNWVKQRPGRGLEWIGRIDPSDSEIHYDQKFKDKATLTVDKSSSTAYIQLSSLTSEDSAVYYCALTGIYAMAYWGQGTSVTVSS

SEQ ID NO: 404 - DNA, 732 bp, synthetic construct
  misc_feature 1..732: note = PSCA-2 LH
  source 1..732: mol_type = other DNA
gacatcgtgatgacccaggccgctccaagcgtgccagtgaccccaggcgagagcgtgtccatcagctgcaggtccagcaagagcctgctgcacagcaacggcaacacctacctgtactggtttctgcagaggccaggccagagcccccagctgctgatctacaggatgagcaacctggctagcggcgtgccagacagattcagcggcagcggctctggaaccgccttcaccctgaggatcagcagggtggaggccgaggacgtgggcgtgtactactgcctgcagcacctggaatacccctacaccttcggcggagggaccaagctggaactgaagggtggtggtggttctggcggcggcggctccggtggtggtggttctcaggtgcaggtgcagcagccaggcgccgaactggtcaagcctggcgccccagtgaagctgtcctgcaaggccagcggctacaccttcaccaactactggctgaactgggtgaaacagaggcccggcaggggcctggaatggatcggcaggatcgaccccagcgacagcgagatccactacgaccagaagttcaaggacaaggccaccctgaccgtggacaagagcagcagcaccgcctacatccagctgtccagcctgaccagcgaggacagcgccgtgtactattgcgccctgaccggcatctacgccatggcctactggggccagggcaccagcgtgaccgtgtcttcc

SEQ ID NO: 405 - protein, 498 aa, synthetic construct
  REGION 1..498: note = PSCA-2 LH x I2C HL
DIVMTQAAPSVPVTPGESVSISCRSSKSLLHSNGNTYLYWFLQRPGQSPQLLIYRMSNLASGVPDRFSGSGSGTAFTLRISRVEAEDVGVYYCLQHLEYPYTFGGGTKLELKGGGGSGGGGSGGGGSQVQVQQPGAELVKPGAPVKLSCKASGYTFTNYWLNWVKQRPGRGLEWIGRIDPSDSEIHYDQKFKDKATLTVDKSSSTAYIQLSSLTSEDSAVYYCALTGIYAMAYWGQGTSVTVSSGGGGSEVQLVESGGGLVQPGGSLKLSCAASGFTFNKYAMNWVRQAPGKGLEWVARIRSKYNNYATYYADSVKDRFTISRDDSKNTAYLQMNNLKTEDTAVYYCVRHGNFGNSYISYWAYWGQGTLVTVSSGGGGSGGGGSGGGGSQTVVTQEPSLTVSPGGTVTLTCGSSTGAVTSGNYPNWVQQKPGQAPRGLIGGTKFLAPGTPARFSGSLLGGKAALTLSGVQPEDEAEYYCVLWYSNRWVFGGGTKLTVL

SEQ ID NO: 406 - DNA, 1494 bp, synthetic construct
  misc_feature 1..1494: note = PSCA-2 LH x I2C HL
  source 1..1494: mol_type = other DNA
gacatcgtgatgacccaggccgctccaagcgtgccagtgaccccaggcgagagcgtgtccatcagctgcaggtccagcaagagcctgctgcacagcaacggcaacacctacctgtactggtttctgcagaggccaggccagagcccccagctgctgatctacaggatgagcaacctggctagcggcgtgccagacagattcagcggcagcggctctggaaccgccttcaccctgaggatcagcagggtggaggccgaggacgtgggcgtgtactactgcctgcagcacctggaatacccctacaccttcggcggagggaccaagctggaactgaagggtggtggtggttctggcggcggcggctccggtggtggtggttctcaggtgcaggtgcagcagccaggcgccgaactggtcaagcctggcgccccagtgaagctgtcctgcaaggccagcggctacaccttcaccaactactggctgaactgggtgaaacagaggcccggcaggggcctggaatggatcggcaggatcgaccccagcgacagcgagatccactacgaccagaagttcaaggacaaggccaccctgaccgtggacaagagcagcagcaccgcctacatccagctgtccagcctgaccagcgaggacagcgccgtgtactattgcgccctgaccggcatctacgccatggcctactggggccagggcaccagcgtgaccgtgtcttccggaggtggtggatccgaggtgcagctggtcgagtctggaggaggattggtgcagcctggagggtcattgaaactctcatgtgcagcctctggattcaccttcaataagtacgccatgaactgggtccgccaggctccaggaaagggtttggaatgggttgctcgcataagaagtaaatataataattatgcaacatattatgccgattcagtgaaagacaggttcaccatctccagagatgattcaaaaaacactgcctatctacaaatgaacaacttgaaaactgaggacactgccgtgtactactgtgtgagacatgggaacttcggtaatagctacatatcctactgggcttactggggccaagggactctggtcaccgtctcctcaggtggtggtggttctggcggcggcggctccggtggtggtggttctcagactgttgtgactcaggaaccttcactcaccgtatcacctggtggaacagtcacactcacttgtggctcctcgactggggctgttacatctggcaactacccaaactgggtccaacaaaaaccaggtcaggcaccccgtggtctaataggtgggactaagttcctcgcccccggtactcctgccagattctcaggctccctgcttggaggcaaggctgccctcaccctctcaggggtacagccagaggatgaggcagaatattactgtgttctatggtacagcaaccgctgggtgttcggtggaggaaccaaactgactgtccta

SEQ ID NO: 407 - protein, 112 aa, synthetic construct
  REGION 1..112: note = PSCA-3 VL
DVVMTQTPLTLSVTIGQPASISCKSSQSLLDSDGKTYLNWLLQRPGQSPKRLIYLVSTLDSGVPDRFTGSGSGTDFTLKISRVEAEDLGVYYCWQGTHFPRTFGGGTKLEIK

SEQ ID NO: 408 - DNA, 336 bp, synthetic construct
  misc_feature 1..336: note = PSCA-3 VL
  source 1..336: mol_type = other DNA
gacgtggtcatgacccagacccccctgaccctgagcgtgaccatcggccagccagccagcatctcttgcaagtccagccagtccctgctggacagcgacggcaagacctacctgaactggctgctgcagaggccaggccagagccccaagaggctgatctacctggtgtccaccctggacagcggcgtgccagacagattcaccggcagcggctccggcaccgacttcaccctgaagatcagcagggtggaggccgaggacctgggcgtgtactactgctggcagggcacccacttcccaaggaccttcggcggagggaccaagctggaaatcaag

SEQ ID NO: 409 - protein, 16 aa, synthetic construct
  REGION 1..16: note = PSCA-3 LCDR1
KSSQSLLDSDGKTYLN

SEQ ID NO: 410 - protein, 7 aa, synthetic construct
  REGION 1..7: note = PSCA-3 LCDR2
LVSTLDS

SEQ ID NO: 411 - protein, 9 aa, synthetic construct
  REGION 1..9: note = PSCA-3 LCDR3
WQGTHFPRT

SEQ ID NO: 412 - protein, 114 aa, synthetic construct
  REGION 1..114: note = PSCA-3 H
EVQLQQSGPDLEKPGASVKISCKPSGNSFTGYYIHWVKQSHGKSLEWIGRVDPNNGFTSYNQKFKGKAILTVDKSSSTAYMELRSLTSEDSAVYYCVGNFFDSWGQGTTLTVSS

SEQ ID NO: 413 - DNA, 342 bp, synthetic construct
  misc_feature 1..342: note = PSCA-3 H
  source 1..342: mol_type = other DNA
gaagtgcagctgcagcagagcggcccagacctggaaaagccaggcgccagcgtgaagatttcctgcaagcccagcggcaacagcttcaccggctactacatccactgggtgaaacagtcccacgggaagagcctggaatggatcggcagagtggaccccaacaacggcttcacctcctacaaccagaagttcaagggcaaggccatcctgaccgtggacaagagcagcagcaccgcctacatggaactgagaagcctgaccagcgaggacagcgccgtgtactattgcgtgggcaacttcttcgacagctggggccagggaaccacactgaccgtgtcctcc

SEQ ID NO: 414 - protein, 5 aa, synthetic construct
  REGION 1..5: note = PSCA-3 HCDR1
GYYIH

SEQ ID NO: 415 - protein, 17 aa, synthetic construct
  REGION 1..17: note = PSCA-3 HCDR2
RVDPNNGFTSYNQKFKG

SEQ ID NO: 416 - protein, 5 aa, synthetic construct
  REGION 1..5: note = PSCA-3 HCDR3
NFFDS

SEQ ID NO: 417 - protein, 241 aa, synthetic construct
  REGION 1..241: note = PSCA-3 HL
EVQLQQSGPDLEKPGASVKISCKPSGNSFTGYYIHWVKQSHGKSLEWIGRVDPNNGFTSYNQKFKGKAILTVDKSSSTAYMELRSLTSEDSAVYYCVGNFFDSWGQGTTLTVSSGGGGSGGGGSGGGGSDVVMTQTPLTLSVTIGQPASISCKSSQSLLDSDGKTYLNWLLQRPGQSPKRLIYLVSTLDSGVPDRFTGSGSGTDFTLKISRVEAEDLGVYYCWQGTHFPRTFGGGTKLEIK

SEQ ID NO: 418 - DNA, 723 bp, synthetic construct
  misc_feature 1..723: note = PSCA-3 HL
  source 1..723: mol_type = other DNA
gaagtgcagctgcagcagagcggcccagacctggaaaagccaggcgccagcgtgaagatttcctgcaagcccagcggcaacagcttcaccggctactacatccactgggtgaaacagtcccacgggaagagcctggaatggatcggcagagtggaccccaacaacggcttcacctcctacaaccagaagttcaagggcaaggccatcctgaccgtggacaagagcagcagcaccgcctacatggaactgagaagcctgaccagcgaggacagcgccgtgtactattgcgtgggcaacttcttcgacagctggggccagggaaccacactgaccgtgtcctccggtggtggtggttctggcggcggcggctccggtggtggtggttctgacgtggtcatgacccagacccccctgaccctgagcgtgaccatcggccagccagccagcatctcttgcaagtccagccagtccctgctggacagcgacggcaagacctacctgaactggctgctgcagaggccaggccagagccccaagaggctgatctacctggtgtccaccctggacagcggcgtgccagacagattcaccggcagcggctccggcaccgacttcaccctgaagatcagcagggtggaggccgaggacctgggcgtgtactactgctggcagggcacccacttcccaaggaccttcggcggagggaccaagctggaaatcaag

SEQ ID NO: 419 - protein, 241 aa, synthetic construct
  REGION 1..241: note = PSCA-3 LH
DVVMTQTPLTLSVTIGQPASISCKSSQSLLDSDGKTYLNWLLQRPGQSPKRLIYLVSTLDSGVPDRFTGSGSGTDFTLKISRVEAEDLGVYYCWQGTHFPRTFGGGTKLEIKGGGGSGGGGSGGGGSEVQLQQSGPDLEKPGASVKISCKPSGNSFTGYYIHWVKQSHGKSLEWIGRVDPNNGFTSYNQKFKGKAILTVDKSSSTAYMELRSLTSEDSAVYYCVGNFFDSWGQGTTLTVSS

SEQ ID NO: 420 - protein, 723 aa, synthetic construct
  REGION 1..723: note = PSCA-3 LH
GACGTGGTCATGACCCAGACCCCCCTGACCCTGAGCGTGACCATCGGCCAGCCAGCCAGCATCTCTTGCAAGTCCAGCCAGTCCCTGCTGGACAGCGACGGCAAGACCTACCTGAACTGGCTGCTGCAGAGGCCAGGCCAGAGCCCCAAGAGGCTGATCTACCTGGTGTCCACCCTGGACAGCGGCGTGCCAGACAGATTCACCGGCAGCGGCTCCGGCACCGACTTCACCCTGAAGATCAGCAGGGTGGAGGCCGAGGACCTGGGCGTGTACTACTGCTGGCAGGGCACCCACTTCCCAAGGACCTTCGGCGGAGGGACCAAGCTGGAAATCAAGGGTGGTGGTGGTTCTGGCGGCGGCGGCTCCGGTGGTGGTGGTTCTGAAGTGCAGCTGCAGCAGAGCGGCCCAGACCTGGAAAAGCCAGGCGCCAGCGTGAAGATTTCCTGCAAGCCCAGCGGCAACAGCTTCACCGGCTACTACATCCACTGGGTGAAACAGTCCCACGGGAAGAGCCTGGAATGGATCGGCAGAGTGGACCCCAACAACGGCTTCACCTCCTACAACCAGAAGTTCAAGGGCAAGGCCATCCTGACCGTGGACAAGAGCAGCAGCACCGCCTACATGGAACTGAGAAGCCTGACCAGCGAGGACAGCGCCGTGTACTATTGCGTGGGCAACTTCTTCGACAGCTGGGGCCAGGGAACCACACTGACCGTGTCCTCC

SEQ ID NO: 421 - protein, 496 aa, synthetic construct
  REGION 1..496: note = PSCA-3 HL x I2C HL
EVQLQQSGPDLEKPGASVKISCKPSGNSFTGYYIHWVKQSHGKSLEWIGRVDPNNGFTSYNQKFKGKAILTVDKSSSTAYMELRSLTSEDSAVYYCVGNFFDSWGQGTTLTVSSGGGGSGGGGSGGGGSDVVMTQTPLTLSVTIGQPASISCKSSQSLLDSDGKTYLNWLLQRPGQSPKRLIYLVSTLDSGVPDRFTGSGSGTDFTLKISRVEAEDLGVYYCWQGTHFPRTFGGGTKLEIKSGGGGSEVQLVESGGGLVQPGGSLKLSCAASGFTFNKYAMNWVRQAPGKGLEWVARIRSKYNNYATYYADSVKDRFTISRDDSKNTAYLQMNNLKTEDTAVYYCVRHGNFGNSYISYWAYWGQGTLVTVSSGGGGSGGGGSGGGGSQTVVTQEPSLTVSPGGTVTLTCGSSTGAVTSGNYPNWVQQKPGQAPRGLIGGTKFLAPGTPARFSGSLLGGKAALTLSGVQPEDEAEYYCVLWYSNRWVFGGGTKLTVL

SEQ ID NO: 422 - DNA, 1488 bp, synthetic construct
  misc_feature 1..1488: note = PSCA-3 HL x I2C HL
  source 1..1488: mol_type = other DNA
gaagtgcagctgcagcagagcggcccagacctggaaaagccaggcgccagcgtgaagatttcctgcaagcccagcggcaacagcttcaccggctactacatccactgggtgaaacagtcccacgggaagagcctggaatggatcggcagagtggaccccaacaacggcttcacctcctacaaccagaagttcaagggcaaggccatcctgaccgtggacaagagcagcagcaccgcctacatggaactgagaagcctgaccagcgaggacagcgccgtgtactattgcgtgggcaacttcttcgacagctggggccagggaaccacactgaccgtgtcctccggtggtggtggttctggcggcggcggctccggtggtggtggttctgacgtggtcatgacccagacccccctgaccctgagcgtgaccatcggccagccagccagcatctcttgcaagtccagccagtccctgctggacagcgacggcaagacctacctgaactggctgctgcagaggccaggccagagccccaagaggctgatctacctggtgtccaccctggacagcggcgtgccagacagattcaccggcagcggctccggcaccgacttcaccctgaagatcagcagggtggaggccgaggacctgggcgtgtactactgctggcagggcacccacttcccaaggaccttcggcggagggaccaagctggaaatcaagtccggaggtggtggatccgaggtgcagctggtcgagtctggaggaggattggtgcagcctggagggtcattgaaactctcatgtgcagcctctggattcaccttcaataagtacgccatgaactgggtccgccaggctccaggaaagggtttggaatgggttgctcgcataagaagtaaatataataattatgcaacatattatgccgattcagtgaaagacaggttcaccatctccagagatgattcaaaaaacactgcctatctacaaatgaacaacttgaaaactgaggacactgccgtgtactactgtgtgagacatgggaacttcggtaatagctacatatcctactgggcttactggggccaagggactctggtcaccgtctcctcaggtggtggtggttctggcggcggcggctccggtggtggtggttctcagactgttgtgactcaggaaccttcactcaccgtatcacctggtggaacagtcacactcacttgtggctcctcgactggggctgttacatctggcaactacccaaactgggtccaacaaaaaccaggtcaggcaccccgtggtctaataggtgggactaagttcctcgcccccggtactcctgccagattctcaggctccctgcttggaggcaaggctgccctcaccctctcaggggtacagccagaggatgaggcagaatattactgtgttctatggtacagcaaccgctgggtgttcggtggaggaaccaaactgactgtccta

SEQ ID NO: 423 - protein, 495 aa, synthetic construct
  REGION 1..495: note = PSCA-3 LH x I2C HL
DVVMTQTPLTLSVTIGQPASISCKSSQSLLDSDGKTYLNWLLQRPGQSPKRLIYLVSTLDSGVPDRFTGSGSGTDFTLKISRVEAEDLGVYYCWQGTHFPRTFGGGTKLEIKGGGGSGGGGSGGGGSEVQLQQSGPDLEKPGASVKISCKPSGNSFTGYYIHWVKQSHGKSLEWIGRVDPNNGFTSYNQKFKGKAILTVDKSSSTAYMELRSLTSEDSAVYYCVGNFFDSWGQGTTLTVSSGGGGSEVQLVESGGGLVQPGGSLKLSCAASGFTFNKYAMNWVRQAPGKGLEWVARIRSKYNNYATYYADSVKDRFTISRDDSKNTAYLQMNNLKTEDTAVYYCVRHGNFGNSYISYWAYWGQGTLVTVSSGGGGSGGGGSGGGGSQTVVTQEPSLTVSPGGTVTLTCGSSTGAVTSGNYPNWVQQKPGQAPRGLIGGTKFLAPGTPARFSGSLLGGKAALTLSGVQPEDEAEYYCVLWYSNRWVFGGGTKLTVL

SEQ ID NO: 424 - DNA, 1485 bp, synthetic construct
  misc_feature 1..1485: note = PSCA-3 LH x I2C HL
  source 1..1485: mol_type = other DNA
gacgtggtcatgacccagacccccctgaccctgagcgtgaccatcggccagccagccagcatctcttgcaagtccagccagtccctgctggacagcgacggcaagacctacctgaactggctgctgcagaggccaggccagagccccaagaggctgatctacctggtgtccaccctggacagcggcgtgccagacagattcaccggcagcggctccggcaccgacttcaccctgaagatcagcagggtggaggccgaggacctgggcgtgtactactgctggcagggcacccacttcccaaggaccttcggcggagggaccaagctggaaatcaagggtggtggtggttctggcggcggcggctccggtggtggtggttctgaagtgcagctgcagcagagcggcccagacctggaaaagccaggcgccagcgtgaagatttcctgcaagcccagcggcaacagcttcaccggctactacatccactgggtgaaacagtcccacgggaagagcctggaatggatcggcagagtggaccccaacaacggcttcacctcctacaaccagaagttcaagggcaaggccatcctgaccgtggacaagagcagcagcaccgcctacatggaactgagaagcctgaccagcgaggacagcgccgtgtactattgcgtgggcaacttcttcgacagctggggccagggaaccacactgaccgtgtcctccggaggtggtggatccgaggtgcagctggtcgagtctggaggaggattggtgcagcctggagggtcattgaaactctcatgtgcagcctctggattcaccttcaataagtacgccatgaactgggtccgccaggctccaggaaagggtttggaatgggttgctcgcataagaagtaaatataataattatgcaacatattatgccgattcagtgaaagacaggttcaccatctccagagatgattcaaaaaacactgcctatctacaaatgaacaacttgaaaactgaggacactgccgtgtactactgtgtgagacatgggaacttcggtaatagctacatatcctactgggcttactggggccaagggactctggtcaccgtctcctcaggtggtggtggttctggcggcggcggctccggtggtggtggttctcagactgttgtgactcaggaaccttcactcaccgtatcacctggtggaacagtcacactcacttgtggctcctcgactggggctgttacatctggcaactacccaaactgggtccaacaaaaaccaggtcaggcaccccgtggtctaataggtgggactaagttcctcgcccccggtactcctgccagattctcaggctccctgcttggaggcaaggctgccctcaccctctcaggggtacagccagaggatgaggcagaatattactgtgttctatggtacagcaaccgctgggtgttcggtggaggaaccaaactgactgtccta

SEQ ID NO: 425 - protein, 106 aa, synthetic construct
  REGION 1..106: note = PSCA-4 VL
QVVLTQSPAIMSASPGEKVTMACSASSSVRFIHWYQQKSGTSPKRWIYDTSKLASGVPTRFSGSGSGTSYSLTISTMEAEDAATYYCQQWSSSPFTFGSGTKLIIK

SEQ ID NO: 426 - DNA, 318 bp, synthetic construct
  misc_feature 1..318: note = PSCA-4 VL
  source 1..318: mol_type = other DNA
caggtggtgctgacccagagcccagccatcatgagcgccagcccaggcgagaaagtgaccatggcctgcagcgccagcagcagcgtgcggttcatccactggtatcagcagaagtccggcaccagccccaagagatggatctacgacaccagcaagctggctagcggcgtgccaaccagattcagcggaagcggctccggcacctcctacagcctgaccatcagcaccatggaagccgaggacgccgccacctactactgccagcagtggagcagcagccccttcaccttcggcagcggcaccaagctgatcatcaag

SEQ ID NO: 427 - protein, 10 aa, synthetic construct
  REGION 1..10: note = PSCA-4 LCDR1
SASSSVRFIH

SEQ ID NO: 428 - protein, 7 aa, synthetic construct
  REGION 1..7: note = PSCA-4 LCDR2
DTSKLAS

SEQ ID NO: 429 - protein, 9 aa, synthetic construct
  REGION 1..9: note = PSCA-4 LCDR3
QQWSSSPFT

SEQ ID NO: 430 - protein, 112 aa, synthetic construct
  REGION 1..112: note = PSCA-4 H
EVQLQQSGAELVRSGASVKLSCTASGFNIKDYYIHWVNQRPDQGLEWIGWIDPENGDTEFVPKFQGKATMTADIFSNTAYLHLSSLTSEDTAVYYCKTGGFWGQGTLVTVSS

SEQ ID NO: 431 - DNA, 336 bp, synthetic construct
  misc_feature 1..336: note = PSCA-4 H
  source 1..336: mol_type = other DNA
gaagtgcagctgcagcagtctggagccgagctggtcagatctggagccagcgtgaagctgtcttgcaccgccagcggcttcaacatcaaggactactacatccactgggtgaaccagaggcccgaccagggcctggaatggatcggctggatcgaccccgagaacggcgacaccgagttcgtgcccaagttccagggcaaggccaccatgaccgccgacatcttcagcaacaccgcctacctgcacctgagcagcctgacctctgaggacaccgccgtgtactactgcaagaccggcggcttctggggacagggcaccctggtcaccgtgtcctcc

SEQ ID NO: 432 - protein, 5 aa, synthetic construct
  REGION 1..5: note = PSCA-4 HCDR1
DYYIH

SEQ ID NO: 433 - protein, 17 aa, synthetic construct
  REGION 1..17: note = PSCA-4 HCDR2
WIDPENGDTEFVPKFQG

SEQ ID NO: 434 - skipped

SEQ ID NO: 435 - protein, 233 aa, synthetic construct
  REGION 1..233: note = PSCA-4 HL
EVQLQQSGAELVRSGASVKLSCTASGFNIKDYYIHWVNQRPDQGLEWIGWIDPENGDTEFVPKFQGKATMTADIFSNTAYLHLSSLTSEDTAVYYCKTGGFWGQGTLVTVSSGGGGSGGGGSGGGGSQVVLTQSPAIMSASPGEKVTMACSASSSVRFIHWYQQKSGTSPKRWIYDTSKLASGVPTRFSGSGSGTSYSLTISTMEAEDAATYYCQQWSSSPFTFGSGTKLIIK

SEQ ID NO: 436 - DNA, 699 bp, synthetic construct
  misc_feature 1..699: note = PSCA-4 HL
  source 1..699: mol_type = other DNA
gaagtgcagctgcagcagtctggagccgagctggtcagatctggagccagcgtgaagctgtcttgcaccgccagcggcttcaacatcaaggactactacatccactgggtgaaccagaggcccgaccagggcctggaatggatcggctggatcgaccccgagaacggcgacaccgagttcgtgcccaagttccagggcaaggccaccatgaccgccgacatcttcagcaacaccgcctacctgcacctgagcagcctgacctctgaggacaccgccgtgtactactgcaagaccggcggcttctggggacagggcaccctggtcaccgtgtcctccggtggtggtggttctggcggcggcggctccggtggtggtggttctcaggtggtgctgacccagagcccagccatcatgagcgccagcccaggcgagaaagtgaccatggcctgcagcgccagcagcagcgtgcggttcatccactggtatcagcagaagtccggcaccagccccaagagatggatctacgacaccagcaagctggctagcggcgtgccaaccagattcagcggaagcggctccggcacctcctacagcctgaccatcagcaccatggaagccgaggacgccgccacctactactgccagcagtggagcagcagccccttcaccttcggcagcggcaccaagctgatcatcaag

SEQ ID NO: 437 - protein, 233 aa, synthetic construct
  REGION 1..233: note = PSCA-4 LH
QVVLTQSPAIMSASPGEKVTMACSASSSVRFIHWYQQKSGTSPKRWIYDTSKLASGVPTRFSGSGSGTSYSLTISTMEAEDAATYYCQQWSSSPFTFGSGTKLIIKGGGGSGGGGSGGGGSEVQLQQSGAELVRSGASVKLSCTASGFNIKDYYIHWVNQRPDQGLEWIGWIDPENGDTEFVPKFQGKATMTADIFSNTAYLHLSSLTSEDTAVYYCKTGGFWGQGTLVTVSS

SEQ ID NO: 438 - DNA, 699 bp, synthetic construct
  misc_feature 1..699: note = PSCA-4 LH
  source 1..699: mol_type = other DNA
caggtggtgctgacccagagcccagccatcatgagcgccagcccaggcgagaaagtgaccatggcctgcagcgccagcagcagcgtgcggttcatccactggtatcagcagaagtccggcaccagccccaagagatggatctacgacaccagcaagctggctagcggcgtgccaaccagattcagcggaagcggctccggcacctcctacagcctgaccatcagcaccatggaagccgaggacgccgccacctactactgccagcagtggagcagcagccccttcaccttcggcagcggcaccaagctgatcatcaagggtggtggtggttctggcggcggcggctccggtggtggtggttctgaagtgcagctgcagcagtctggagccgagctggtcagatctggagccagcgtgaagctgtcttgcaccgccagcggcttcaacatcaaggactactacatccactgggtgaaccagaggcccgaccagggcctggaatggatcggctggatcgaccccgagaacggcgacaccgagttcgtgcccaagttccagggcaaggccaccatgaccgccgacatcttcagcaacaccgcctacctgcacctgagcagcctgacctctgaggacaccgccgtgtactactgcaagaccggcggcttctggggacagggcaccctggtcaccgtgtcctcc

SEQ ID NO: 439 - protein, 488 aa, synthetic construct
  REGION 1..488: note = PSCA-4 HL x I2C HL
EVQLQQSGAELVRSGASVKLSCTASGFNIKDYYIHWVNQRPDQGLEWIGWIDPENGDTEFVPKFQGKATMTADIFSNTAYLHLSSLTSEDTAVYYCKTGGFWGQGTLVTVSSGGGGSGGGGSGGGGSQVVLTQSPAIMSASPGEKVTMACSASSSVRFIHWYQQKSGTSPKRWIYDTSKLASGVPTRFSGSGSGTSYSLTISTMEAEDAATYYCQQWSSSPFTFGSGTKLIIKSGGGGSEVQLVESGGGLVQPGGSLKLSCAASGFTFNKYAMNWVRQAPGKGLEWVARIRSKYNNYATYYADSVKDRFTISRDDSKNTAYLQMNNLKTEDTAVYYCVRHGNFGNSYISYWAYWGQGTLVTVSSGGGGSGGGGSGGGGSQTVVTQEPSLTVSPGGTVTLTCGSSTGAVTSGNYPNWVQQKPGQAPRGLIGGTKFLAPGTPARFSGSLLGGKAALTLSGVQPEDEAEYYCVLWYSNRWVFGGGTKLTVL

SEQ ID NO: 440 - DNA, 1464 bp, synthetic construct
  misc_feature 1..1464: note = PSCA-4 HL x I2C HL
  source 1..1464: mol_type = other DNA
gaagtgcagctgcagcagtctggagccgagctggtcagatctggagccagcgtgaagctgtcttgcaccgccagcggcttcaacatcaaggactactacatccactgggtgaaccagaggcccgaccagggcctggaatggatcggctggatcgaccccgagaacggcgacaccgagttcgtgcccaagttccagggcaaggccaccatgaccgccgacatcttcagcaacaccgcctacctgcacctgagcagcctgacctctgaggacaccgccgtgtactactgcaagaccggcggcttctggggacagggcaccctggtcaccgtgtcctccggtggtggtggttctggcggcggcggctccggtggtggtggttctcaggtggtgctgacccagagcccagccatcatgagcgccagcccaggcgagaaagtgaccatggcctgcagcgccagcagcagcgtgcggttcatccactggtatcagcagaagtccggcaccagccccaagagatggatctacgacaccagcaagctggctagcggcgtgccaaccagattcagcggaagcggctccggcacctcctacagcctgaccatcagcaccatggaagccgaggacgccgccacctactactgccagcagtggagcagcagccccttcaccttcggcagcggcaccaagctgatcatcaagtccggaggtggtggatccgaggtgcagctggtcgagtctggaggaggattggtgcagcctggagggtcattgaaactctcatgtgcagcctctggattcaccttcaataagtacgccatgaactgggtccgccaggctccaggaaagggtttggaatgggttgctcgcataagaagtaaatataataattatgcaacatattatgccgattcagtgaaagacaggttcaccatctccagagatgattcaaaaaacactgcctatctacaaatgaacaacttgaaaactgaggacactgccgtgtactactgtgtgagacatgggaacttcggtaatagctacatatcctactgggcttactggggccaagggactctggtcaccgtctcctcaggtggtggtggttctggcggcggcggctccggtggtggtggttctcagactgttgtgactcaggaaccttcactcaccgtatcacctggtggaacagtcacactcacttgtggctcctcgactggggctgttacatctggcaactacccaaactgggtccaacaaaaaccaggtcaggcaccccgtggtctaataggtgggactaagttcctcgcccccggtactcctgccagattctcaggctccctgcttggaggcaaggctgccctcaccctctcaggggtacagccagaggatgaggcagaatattactgtgttctatggtacagcaaccgctgggtgttcggtggaggaaccaaactgactgtccta

SEQ ID NO: 441 - protein, 487 aa, synthetic construct
  REGION 1..487: note = PSCA-4 LH x I2C HL
QVVLTQSPAIMSASPGEKVTMACSASSSVRFIHWYQQKSGTSPKRWIYDTSKLASGVPTRFSGSGSGTSYSLTISTMEAEDAATYYCQQWSSSPFTFGSGTKLIIKGGGGSGGGGSGGGGSEVQLQQSGAELVRSGASVKLSCTASGFNIKDYYIHWVNQRPDQGLEWIGWIDPENGDTEFVPKFQGKATMTADIFSNTAYLHLSSLTSEDTAVYYCKTGGFWGQGTLVTVSSGGGGSEVQLVESGGGLVQPGGSLKLSCAASGFTFNKYAMNWVRQAPGKGLEWVARIRSKYNNYATYYADSVKDRFTISRDDSKNTAYLQMNNLKTEDTAVYYCVRHGNFGNSYISYWAYWGQGTLVTVSSGGGGSGGGGSGGGGSQTVVTQEPSLTVSPGGTVTLTCGSSTGAVTSGNYPNWVQQKPGQAPRGLIGGTKFLAPGTPARFSGSLLGGKAALTLSGVQPEDEAEYYCVLWYSNRWVFGGGTKLTVL

SEQ ID NO: 442 - DNA, 1461 bp, synthetic construct
  misc_feature 1..1461: note = PSCA-4 LH x I2C HL
  source 1..1461: mol_type = other DNA
caggtggtgctgacccagagcccagccatcatgagcgccagcccaggcgagaaagtgaccatggcctgcagcgccagcagcagcgtgcggttcatccactggtatcagcagaagtccggcaccagccccaagagatggatctacgacaccagcaagctggctagcggcgtgccaaccagattcagcggaagcggctccggcacctcctacagcctgaccatcagcaccatggaagccgaggacgccgccacctactactgccagcagtggagcagcagccccttcaccttcggcagcggcaccaagctgatcatcaagggtggtggtggttctggcggcggcggctccggtggtggtggttctgaagtgcagctgcagcagtctggagccgagctggtcagatctggagccagcgtgaagctgtcttgcaccgccagcggcttcaacatcaaggactactacatccactgggtgaaccagaggcccgaccagggcctggaatggatcggctggatcgaccccgagaacggcgacaccgagttcgtgcccaagttccagggcaaggccaccatgaccgccgacatcttcagcaacaccgcctacctgcacctgagcagcctgacctctgaggacaccgccgtgtactactgcaagaccggcggcttctggggacagggcaccctggtcaccgtgtcctccggaggtggtggatccgaggtgcagctggtcgagtctggaggaggattggtgcagcctggagggtcattgaaactctcatgtgcagcctctggattcaccttcaataagtacgccatgaactgggtccgccaggctccaggaaagggtttggaatgggttgctcgcataagaagtaaatataataattatgcaacatattatgccgattcagtgaaagacaggttcaccatctccagagatgattcaaaaaacactgcctatctacaaatgaacaacttgaaaactgaggacactgccgtgtactactgtgtgagacatgggaacttcggtaatagctacatatcctactgggcttactggggccaagggactctggtcaccgtctcctcaggtggtggtggttctggcggcggcggctccggtggtggtggttctcagactgttgtgactcaggaaccttcactcaccgtatcacctggtggaacagtcacactcacttgtggctcctcgactggggctgttacatctggcaactacccaaactgggtccaacaaaaaccaggtcaggcaccccgtggtctaataggtgggactaagttcctcgcccccggtactcctgccagattctcaggctccctgcttggaggcaaggctgccctcaccctctcaggggtacagccagaggatgaggcagaatattactgtgttctatggtacagcaaccgctgggtgttcggtggaggaaccaaactgactgtccta

SEQ ID NO: 443 - protein, 130 aa, Homo sapiens
MGWSCIILFLVATATGVHSDYKDDDDKLLCYSCKAQVSNEDCLQVENCTQLGEQCWTARIRAVGLLTVISKGCSLNCVDDSQDYYVGKKNITCCDTDLCNASGAHALQPAAAILALLPALGLLLWGPGQL

SEQ ID NO: 444 - DNA, 393 bp, Homo sapiens
  source 1..393: mol_type = genomic DNA
atgggatggagctgtatcatcctcttcttggtagcaacagctacaggtgtacactccgattacaaggacgacgatgacaagctgctgtgctactcctgcaaagcccaggtgagcaacgaggactgcctgcaggtggagaactgcacccagctgggggagcagtgctggaccgcgcgcatccgcgcagttggcctcctgaccgtcatcagcaaaggctgcagcttgaactgcgtggatgactcacaggactactacgtgggcaagaagaacatcacgtgctgtgacaccgacttgtgcaacgccagcggggcccatgccctgcagccggctgctgccatccttgcgctgctccctgcactcggcctgctgctctggggacccggccagctctag

SEQ ID NO: 445 - protein, 130 aa, Macaca fascicularis
MGWSCIILFLVATATGVHSDYKDDDDKLLCYSCKAQVSNEDCLNVENCTQPEEQCWTERIRAVGLLTVISKGCSSNCVDDSQDYYVGKKNITCCDTDLCNASGAHALQPAAAILALLPALSLLLWGPRQL

SEQ ID NO: 446 - DNA, 393 bp, Macaca fascicularis
  source 1..393: mol_type = genomic DNA
atgggatggagctgtatcatcctcttcttggtagcaacagctacaggtgtacactccgattacaaggacgacgatgacaagctgctgtgctactcctgcaaggcccaggtgagcaacgaggactgcctgaatgtggagaactgcacgcagccggaggagcagtgctggaccgagcgcatccgcgccgtgggcctcctgaccgtcatcagcaaaggctgcagctcaaactgcgtggatgactcacaggactactacgtgggcaagaagaacatcacctgctgtgacaccgacctgtgcaacgccagcggggcccatgcactgcagccggctgctgccatcctggcactgctccctgcactcagcctgctgctttggggccccagacagctgtag

SEQ ID NO: 447 - DNA, 21 bp, synthetic construct
  misc_feature 1..21: note = forward primer
  source 1..21: mol_type = other DNA
caccacagcccaccagtgacc

SEQ ID NO: 448 - DNA, 21 bp, synthetic construct
  misc_feature 1..21: note = reverse primer
  source 1..21: mol_type = other DNA
gaggcctggggcaccacaccc

SEQ ID NO: 449 - DNA, 54 bp, synthetic construct
  misc_feature 1..54: note = P3-VH-A-XhoI
  source 1..54: mol_type = other DNA
cctgatctcgagagcggcscagasstgraaaagccaggcgccacggtgaagatt

SEQ ID NO: 450 - DNA, 69 bp, synthetic construct
  misc_feature 1..69: note = P3-VH-B
  source 1..69: mol_type = other DNA
ggcgccacggtgaagatttcctgcaagsycagcggcwacacgttcaccggctactacatccactgggtg

SEQ ID NO: 451 - DNA, 87 bp, synthetic construct
  misc_feature 1..87: note = P3-VH-C
  source 1..87: mol_type = other DNA
gtaggaggtgaagccgttgttggggtccactctgccsatccattccaggcycttcccgkgggmctgttkcacccagtggatgtagta

SEQ ID NO: 452 - DNA, 87 bp, synthetic construct
  misc_feature 1..87: note = P3-VH-D
  source 1..87: mol_type = other DNA
aacggcttcacctcctacaaccagaagttcaagggcarggycayamtkaccgyggacamgagcaccrrcaccgcctacatggaactg

SEQ ID NO: 453 - DNA, 78 bp, synthetic construct
  misc_feature 1..78: note = P3-VH-E
  source 1..78: mol_type = other DNA
gctgtcgaagaagttgcccrcgcaatagtacacggcggtgtcctcgctgskcaggctkctcagttccatgtaggcggt

SEQ ID NO: 454 - DNA, 48 bp, synthetic construct
  misc_feature 1..48: note = P3-VH-F-BstEII
  source 1..48: mol_type = other DNA
cacgtcggtgaccgtggttccctggccccagctgtcgaagaagttgcc

SEQ ID NO: 455 - DNA, 87 bp, synthetic construct
  misc_feature 1..87: note = PSCA2VH-A-XHO1
  source 1..87: mol_type = other DNA
caggtgctcgagycaggcgccgaastgrwgaagcctggcgccmcagtgaagmtatcctgcaaggycagcggctacaccttcaccaac

SEQ ID NO: 456 - DNA, 93 bp, synthetic construct
  misc_feature 1..93: note = PSCA2VH-B
  source 1..93: mol_type = other DNA
gctgtcgctggggtcgatcctgccyatccattccaggcccytgccgggcsyctgttkcacccagttcagccagtagttggtgaaggtgtagcc

SEQ ID NO: 457 - DNA, 93 bp, synthetic construct
  misc_feature 1..93: note = PSCA2VH-C
  source 1..93: mol_type = other DNA
aggatcgaccccagcgacagcgagatccactacgaccagaagttcaaggacaragycaccmtaaccgyggacamgagcaccrrcaccgcctac

SEQ ID NO: 458 - DNA, 76 bp, synthetic construct
  misc_feature 1..76: note = PSCA2VH-D
  source 1..76: mol_type = other DNA
ggccagggcgcaatagtacacggcggtgtcctcgcttstcaggctggacagctssatgtaggcggtgyyggtgctc

SEQ ID NO: 459 - DNA, 72 bp, synthetic construct
  misc_feature 1..72: note = PSCA2VH-E-BSTE2
  source 1..72: mol_type = other DNA
agacacggtgaccgtggtgccctggccccagtaggccatggcgtagatgccggtcagggcgcaatagtacac

SEQ ID NO: 460 - DNA, 69 bp, synthetic construct
  misc_feature 1..69: note = P3-VL-A-SacI
  source 1..69: mol_type = other DNA
cctgtagagctcgtcatgacccagtcccccctgtccctgmscgtgaccmtcggccagccagccagcatc

SEQ ID NO: 461 - DNA, 75 bp, synthetic construct
  misc_feature 1..75: note = P3-VL-B
  source 1..75: mol_type = other DNA
ccagttcaggtaggtcttgccgtcgctgtccagcagggactggctggacttgcaagagatgctggctggctggcc

SEQ ID NO: 462 - DNA, 75 bp, synthetic construct
  misc_feature 1..75: note = P3-VL-C
  source 1..75: mol_type = other DNA
aagacctacctgaactggytscwgcagaggccaggccagagccccargaggctgatctacctggtgtccaccctg

SEQ ID NO: 463 - DNA, 72 bp, synthetic construct
  misc_feature 1..72: note = P3-VL-D
  source 1..72: mol_type = other DNA
ggtgaagtcggtgccggagccgctgccggagaatctgtctggcacgccgctgtccagggtggacaccaggta

SEQ ID NO: 464 - DNA, 78 bp, synthetic construct
  misc_feature 1..78: note = P3-VL-E
  source 1..78: mol_type = other DNA
tccggcaccgacttcaccctgaagatcagcagggtggaggccgaggacstgggcgtgtactactgctggcagggcacc

SEQ ID NO: 465 - DNA, 81 bp, synthetic construct
  misc_feature 1..81: note = P3-VL-F-BsiWI/SpeI
  source 1..81: mol_type = other DNA
ccagacactagtcgtacgcttgatttccagcttggtccctccgccgaaggtccttgggaagtgggtgccctgccagcagta

SEQ ID NO: 466 - DNA, 84 bp, synthetic construct
  misc_feature 1..84: note = PSCA2VL-a-SAC1
  source 1..84: mol_type = other DNA
cagacagagctcgtgatgacccagkcasctcyaagcstgccagtgaccccaggcgagycagygtccatcagctgcaggtccagc

SEQ ID NO: 467 - DNA, 91 bp, synthetic construct
  misc_feature 1..91: note = PSCA2VL-b
  source 1..91: mol_type = other DNA
ctgggggctctggcctggcytctgcagawaccagtacaggtaggtgttgccgttgctgtgcagcaggctcttgctggacctgcagctgatg

SEQ ID NO: 468 - DNA, 90 bp, synthetic construct
  misc_feature 1..90: note = PSCA2VL-c
  source 1..90: mol_type = other DNA
ccaggccagagcccccagctgctgatctacaggatgagcaacctggctagcggcgtgccagacagattcagcggcagcggctctggaacc

SEQ ID NO: 469 - DNA, 78 bp, synthetic construct
  misc_feature 1..78: note = PSCA2VL-d
  source 1..78: mol_type = other DNA
caggcagtagtacacgcccacgtcctcggcctccaccctgctgatcytcagggtgaagkcggttccagagccgctgcc

SEQ ID NO: 470 - DNA, 90 bp, synthetic construct
  misc_feature 1..90: note = PSCA2VL-e-BsiW1-Spe1
  source 1..90: mol_type = other DNA
gtgctgactagtcgtacgcttgatttccagcttggtcccttggccgaaggtgtaggggtattccaggtgctgcaggcagtagtacacgcc

SEQ ID NO: 471 - protein, 111 aa, synthetic construct
  REGION 1..111: note = HD37 L
DIQLTQSPASLAVSLGQRATISCKASQSVDYDGDSYLNWYQQIPGQPPKLLIYDASNLVSGIPPRFSGSGSGTDFTLNIHPVEKVDAATYHCQQSTEDPWTFGGGTKLEIK

SEQ ID NO: 472 - DNA, 333 bp, synthetic construct
  misc_feature 1..333: note = HD37 L
  source 1..333: mol_type = other DNA
gatatccagctgacccagtctccagcttctttggctgtgtctctagggcagagggccaccatctcctgcaaggccagccaaagtgttgattatgatggtgatagttatttgaactggtaccaacagattccaggacagccacccaaactcctcatctatgatgcatccaatctagtttctgggatcccacccaggtttagtggcagtgggtctgggacagacttcaccctcaacatccatcctgtggagaaggtggatgctgcaacctatcactgtcagcaaagtactgaggatccgtggacgttcggtggagggaccaagctcgagatcaaa

SEQ ID NO: 473 - protein, 15 aa, synthetic construct
  REGION 1..15: note = HD37 LCDR1
KASQSVDYDGDSYLN

SEQ ID NO: 474 - protein, 7 aa, synthetic construct
  REGION 1..7: note = HD37 LCDR2
DASNLVS

SEQ ID NO: 475 - protein, 9 aa, synthetic construct
  REGION 1..9: note = HD37 LCDR3
QQSTEDPWT

SEQ ID NO: 476 - protein, 124 aa, synthetic construct
  REGION 1..124: note = HD37 H
QVQLQQSGAELVRPGSSVKISCKASGYAFSSYWMNWVKQRPGQGLEWIGQIWPGDGDTNYNGKFKGKATLTADESSSTAYMQLSSLASEDSAVYFCARRETTTVGRYYYAMDYWGQGTTVTVSS

SEQ ID NO: 477 - DNA, 372 bp, synthetic construct
  misc_feature 1..372: note = HD37 H
  source 1..372: mol_type = other DNA
caggtgcagctgcagcagtctggggctgagctggtgaggcctgggtcctcagtgaagatttcctgcaaggcttctggctatgcattcagtagctactggatgaactgggtgaagcagaggcctggacagggtcttgagtggattggacagatttggcctggagatggtgatactaactacaatggaaagttcaagggtaaagccactctgactgcagacgaatcctccagcacagcctacatgcaactcagcagcctagcatctgaggactctgcggtctatttctgtgcaagacgggagactacgacggtaggccgttattactatgctatggactactggggccaagggaccacggtcaccgtctcctcc

SEQ ID NO: 478 - protein, 5 aa, synthetic construct
  REGION 1..5: note = HD37 HCDR1
SYWMN

SEQ ID NO: 479 - protein, 17 aa, synthetic construct
  REGION 1..17: note = HD37 HCDR2
QIWPGDGDTNYNGKFKG

SEQ ID NO: 480 - protein, 15 aa, synthetic construct
  REGION 1..15: note = HD37 HCDR3
RETTTVGRYYYAMDY

SEQ ID NO: 481 - protein, 504 aa, synthetic construct
  REGION 1..504: note = HD37 LH x I2C HL
DIQLTQSPASLAVSLGQRATISCKASQSVDYDGDSYLNWYQQIPGQPPKLLIYDASNLVSGIPPRFSGSGSGTDFTLNIHPVEKVDAATYHCQQSTEDPWTFGGGTKLEIKGGGGSGGGGSGGGGSQVQLQQSGAELVRPGSSVKISCKASGYAFSSYWMNWVKQRPGQGLEWIGQIWPGDGDTNYNGKFKGKATLTADESSSTAYMQLSSLASEDSAVYFCARRETTTVGRYYYAMDYWGQGTTVTVSSGGGGSEVQLVESGGGLVQPGGSLKLSCAASGFTFNKYAMNWVRQAPGKGLEWVARIRSKYNNYATYYADSVKDRFTISRDDSKNTAYLQMNNLKTEDTAVYYCVRHGNFGNSYISYWAYWGQGTLVTVSSGGGGSGGGGSGGGGSQTVVTQEPSLTVSPGGTVTLTCGSSTGAVTSGNYPNWVQQKPGQAPRGLIGGTKFLAPGTPARFSGSLLGGKAALTLSGVQPEDEAEYYCVLWYSNRWVFGGGTKLTVL

SEQ ID NO: 482 - DNA, 1512 bp, synthetic construct
  misc_feature 1..1512: note = HD37 LH x I2C HL
  source 1..1512: mol_type = other DNA
gatatccagctgacccagtctccagcttctttggctgtgtctctagggcagagggccaccatctcctgcaaggccagccaaagtgttgattatgatggtgatagttatttgaactggtaccaacagattccaggacagccacccaaactcctcatctatgatgcatccaatctagtttctgggatcccacccaggtttagtggcagtgggtctgggacagacttcaccctcaacatccatcctgtggagaaggtggatgctgcaacctatcactgtcagcaaagtactgaggatccgtggacgttcggtggagggaccaagctcgagatcaaaggtggtggtggttctggcggcggcggctccggtggtggtggttctcaggtgcagctgcagcagtctggggctgagctggtgaggcctgggtcctcagtgaagatttcctgcaaggcttctggctatgcattcagtagctactggatgaactgggtgaagcagaggcctggacagggtcttgagtggattggacagatttggcctggagatggtgatactaactacaatggaaagttcaagggtaaagccactctgactgcagacgaatcctccagcacagcctacatgcaactcagcagcctagcatctgaggactctgcggtctatttctgtgcaagacgggagactacgacggtaggccgttattactatgctatggactactggggccaagggaccacggtcaccgtctcctccggaggtggtggatccgaggtgcagctggtcgagtctggaggaggattggtgcagcctggagggtcattgaaactctcatgtgcagcctctggattcaccttcaataagtacgccatgaactgggtccgccaggctccaggaaagggtttggaatgggttgctcgcataagaagtaaatataataattatgcaacatattatgccgattcagtgaaagacaggttcaccatctccagagatgattcaaaaaacactgcctatctacaaatgaacaacttgaaaactgaggacactgccgtgtactactgtgtgagacatgggaacttcggtaatagctacatatcctactgggcttactggggccaagggactctggtcaccgtctcctcaggtggtggtggttctggcggcggcggctccggtggtggtggttctcagactgttgtgactcaggaaccttcactcaccgtatcacctggtggaacagtcacactcacttgtggctcctcgactggggctgttacatctggcaactacccaaactgggtccaacaaaaaccaggtcaggcaccccgtggtctaataggtgggactaagttcctcgcccccggtactcctgccagattctcaggctccctgcttggaggcaaggctgccctcaccctctcaggggtacagccagaggatgaggcagaatattactgtgttctatggtacagcaaccgctgggtgttcggtggaggaaccaaactgactgtccta

SEQ ID NO: 483 - protein, 504 aa, synthetic construct
  REGION 1..504: note = HD37 LH x H2C HL
DIQLTQSPASLAVSLGQRATISCKASQSVDYDGDSYLNWYQQIPGQPPKLLIYDASNLVSGIPPRFSGSGSGTDFTLNIHPVEKVDAATYHCQQSTEDPWTFGGGTKLEIKGGGGSGGGGSGGGGSQVQLQQSGAELVRPGSSVKISCKASGYAFSSYWMNWVKQRPGQGLEWIGQIWPGDGDTNYNGKFKGKATLTADESSSTAYMQLSSLASEDSAVYFCARRETTTVGRYYYAMDYWGQGTTVTVSSGGGGSEVQLVESGGGLVQPGGSLKLSCAASGFTFNKYAMNWVRQAPGKGLEWVARIRSKYNNYATYYADSVKDRFTISRDDSKNTAYLQMNNLKTEDTAVYYCVRHGNFGNSYISYWAYWGQGTLVTVSSGGGGSGGGGSGGGGSQTVVTQEPSLTVSPGGTVTLTCGSSTGAVTSGYYPNWVQQKPGQAPRGLIGGTKFLAPGTPARFSGSLLGGKAALTLSGVQPEDEAEYYCALWYSNRWVFGGGTKLTVL

SEQ ID NO: 484 - DNA, 1512 bp, synthetic construct
  misc_feature 1..1512: note = HD37 LH x H2C HL
  source 1..1512: mol_type = other DNA
gatatccagctgacccagtctccagcttctttggctgtgtctctagggcagagggccaccatctcctgcaaggccagccaaagtgttgattatgatggtgatagttatttgaactggtaccaacagattccaggacagccacccaaactcctcatctatgatgcatccaatctagtttctgggatcccacccaggtttagtggcagtgggtctgggacagacttcaccctcaacatccatcctgtggagaaggtggatgctgcaacctatcactgtcagcaaagtactgaggatccgtggacgttcggtggagggaccaagctcgagatcaaaggtggtggtggttctggcggcggcggctccggtggtggtggttctcaggtgcagctgcagcagtctggggctgagctggtgaggcctgggtcctcagtgaagatttcctgcaaggcttctggctatgcattcagtagctactggatgaactgggtgaagcagaggcctggacagggtcttgagtggattggacagatttggcctggagatggtgatactaactacaatggaaagttcaagggtaaagccactctgactgcagacgaatcctccagcacagcctacatgcaactcagcagcctagcatctgaggactctgcggtctatttctgtgcaagacgggagactacgacggtaggccgttattactatgctatggactactggggccaagggaccacggtcaccgtctcctccggaggtggtggatccgaggtgcagctggtcgagtctggaggaggattggtgcagcctggagggtcattgaaactctcatgtgcagcctctggattcaccttcaataagtacgccatgaactgggtccgccaggctccaggaaagggtttggaatgggttgctcgcataagaagtaaatataataattatgcaacatattatgccgattcagtgaaagacaggttcaccatctccagagatgattcaaaaaacactgcctatctacaaatgaacaacttgaaaactgaggacactgccgtgtactactgtgtgagacatgggaacttcggtaatagctacatatcctactgggcttactggggccaagggactctggtcaccgtctcctcaggtggtggtggttctggcggcggcggctccggtggtggtggttctcagactgttgtgactcaggaaccttcactcaccgtatcacctggtggaacagtcacactcacttgtggctcctcgactggggctgttacatctggctactacccaaactgggtccaacaaaaaccaggtcaggcaccccgtggtctaataggtgggactaagttcctcgcccccggtactcctgccagattctcaggctccctgcttggaggcaaggctgccctcaccctctcaggggtacagccagaggatgaggcagaatattactgtgctctatggtacagcaaccgctgggtgttcggtggaggaaccaaactgactgtccta

SEQ ID NO: 485 - protein, 504 aa, synthetic construct
  REGION 1..504: note = HD37 LH x F12Q HL
DIQLTQSPASLAVSLGQRATISCKASQSVDYDGDSYLNWYQQIPGQPPKLLIYDASNLVSGIPPRFSGSGSGTDFTLNIHPVEKVDAATYHCQQSTEDPWTFGGGTKLEIKGGGGSGGGGSGGGGSQVQLQQSGAELVRPGSSVKISCKASGYAFSSYWMNWVKQRPGQGLEWIGQIWPGDGDTNYNGKFKGKATLTADESSSTAYMQLSSLASEDSAVYFCARRETTTVGRYYYAMDYWGQGTTVTVSSGGGGSEVQLVESGGGLVQPGGSLKLSCAASGFTFNSYAMNWVRQAPGKGLEWVARIRSKYNNYATYYADSVKGRFTISRDDSKNTAYLQMNNLKTEDTAVYYCVRHGNFGNSYVSWWAYWGQGTLVTVSSGGGGSGGGGSGGGGSQTVVTQEPSLTVSPGGTVTLTCGSSTGAVTSGNYPNWVQQKPGQAPRGLIGGTKFLAPGTPARFSGSLLGGKAALTLSGVQPEDEAEYYCVLWYSNRWVFGGGTKLTVL

SEQ ID NO: 486 - DNA, 1512 bp, synthetic construct
  misc_feature 1..1512: note = HD37 LH x F12Q HL
  source 1..1512: mol_type = other DNA
gatatccagctgacccagtctccagcttctttggctgtgtctctagggcagagggccaccatctcctgcaaggccagccaaagtgttgattatgatggtgatagttatttgaactggtaccaacagattccaggacagccacccaaactcctcatctatgatgcatccaatctagtttctgggatcccacccaggtttagtggcagtgggtctgggacagacttcaccctcaacatccatcctgtggagaaggtggatgctgcaacctatcactgtcagcaaagtactgaggatccgtggacgttcggtggagggaccaagctcgagatcaaaggtggtggtggttctggcggcggcggctccggtggtggtggttctcaggtgcagctgcagcagtctggggctgagctggtgaggcctgggtcctcagtgaagatttcctgcaaggcttctggctatgcattcagtagctactggatgaactgggtgaagcagaggcctggacagggtcttgagtggattggacagatttggcctggagatggtgatactaactacaatggaaagttcaagggtaaagccactctgactgcagacgaatcctccagcacagcctacatgcaactcagcagcctagcatctgaggactctgcggtctatttctgtgcaagacgggagactacgacggtaggccgttattactatgctatggactactggggccaagggaccacggtcaccgtctcctccggaggtggtggatccgaggtgcagctggtcgagtctggaggaggattggtgcagcctggagggtcattgaaactctcatgtgcagcctctggattcaccttcaatagctacgccatgaactgggtccgccaggctccaggaaagggtttggaatgggttgctcgcataagaagtaaatataataattatgcaacatattatgccgattcagtgaaaggcaggttcaccatctccagagatgattcaaaaaacactgcctatctacaaatgaacaacttgaaaactgaggacactgccgtgtactactgtgtgagacatgggaacttcggtaatagctacgtttcctggtgggcttactggggccaagggactctggtcaccgtctcctcaggtggtggtggttctggcggcggcggctccggtggtggtggttctcagactgttgtgactcaggaaccttcactcaccgtatcacctggtggaacagtcacactcacttgtggctcctcgactggggctgttacatctggcaactacccaaactgggtccaacaaaaaccaggtcaggcaccccgtggtctaataggtgggactaagttcctcgcccccggtactcctgccagattctcaggctccctgcttggaggcaaggctgccctcaccctctcaggggtacagccagaggatgaggcagaatattactgtgttctatggtacagcaaccgctgggtgttcggtggaggaaccaaactgactgtccta

SEQ ID NO: 487 - protein, 111 aa, synthetic construct
  REGION 1..111: note = hCD19 26-D6 L
DIQMTQSPASLSASLGDRVTITCKASQSVDYDGDSYLNWYQQKPGKAPKLLIYDASNLVSGIPSRFSGSGSGTDFTLTISSLQQVDFATYYCQQSTEDPWTFGQGTKVEIK

SEQ ID NO: 488 - DNA, 333 bp, synthetic construct
  misc_feature 1..333: note = hCD19 26-D6 L
  source 1..333: mol_type = other DNA
gacatccagatgacccagtctccagcttctttgtctgcgtctctaggggacagagtcaccatcacctgcaaggccagccaaagtgttgattatgatggtgatagttatttgaactggtaccaacagaaaccaggaaaggcacccaaactcctcatctatgatgcatccaatctagtttctgggatcccatccaggtttagtggcagtgggtctgggacagacttcaccctcaccatcagttctctgcagcaggtggatttcgcaacctattactgtcagcaaagtactgaggatccgtggacgttcggtcaagggaccaaggtggagatcaaa

SEQ ID NO: 489 - protein, 15 aa, synthetic construct
  REGION 1..15: note = hCD19 26-D6 LCDR1
KASQSVDYDGDSYLN

SEQ ID NO: 490 - protein, 7 aa, synthetic construct
  REGION 1..7: note = hCD19 26-D6 LCDR2
DASNLVS

SEQ ID NO: 491 - protein, 9 aa, synthetic construct
  REGION 1..9: note = hCD19 26-D6 LCDR3
QQSTEDPWT

SEQ ID NO: 492 - protein, 124 aa, synthetic construct
  REGION 1..124: note = hCD19 26-D6 H
QVQLVQSGAEVKKPGASVKVSCKASGYTFTSYWMNWVKQGPGQGLEWMGQIWPGDGDTNYNGKFKGRVTMTADASTSTVYMELSSLRSEDTAVYFCARRETTTVGRYYYAMDYWGQGTTVTVSS

SEQ ID NO: 493 - DNA, 372 bp, synthetic construct
  misc_feature 1..372: note = hCD19 26-D6 H
  source 1..372: mol_type = other DNA
caggtgcagctggtccagtctggggctgaggtgaagaagcctggggcctcagtgaaggtttcctgcaaggcttctggctatacattcactagctactggatgaactgggtgaagcagggccctggacagggtcttgagtggatgggacagatttggcctggagatggtgatactaactacaatggaaagttcaagggtagagtcactatgactgctgacgcatccaccagcacagtctacatggaactcagcagcctgcgatctgaggacactgcggtctatttctgtgcaagacgggagactacgacggtaggccgttattactatgctatggactactggggccaagggaccacggtcaccgtctcctcc

SEQ ID NO: 494 - protein, 5 aa, synthetic construct
  REGION 1..5: note = hCD19 26-D6 HCDR1
SYWMN

SEQ ID NO: 495 - protein, 17 aa, synthetic construct
  REGION 1..17: note = hCD19 26-D6 HCDR2
QIWPGDGDTNYNGKFKG

SEQ ID NO: 496 - protein, 15 aa, synthetic construct
  REGION 1..15: note = hCD19 26-D6 HCDR3
RETTTVGRYYYAMDY

SEQ ID NO: 497 - protein, 504 aa, synthetic construct
  REGION 1..504: note = hCD19 26-D6 LH x I2C HL
DIQMTQSPASLSASLGDRVTITCKASQSVDYDGDSYLNWYQQKPGKAPKLLIYDASNLVSGIPSRFSGSGSGTDFTLTISSLQQVDFATYYCQQSTEDPWTFGQGTKVEIKGGGGSGGGGSGGGGSQVQLVQSGAEVKKPGASVKVSCKASGYTFTSYWMNWVKQGPGQGLEWMGQIWPGDGDTNYNGKFKGRVTMTADASTSTVYMELSSLRSEDTAVYFCARRETTTVGRYYYAMDYWGQGTTVTVSSGGGGSEVQLVESGGGLVQPGGSLKLSCAASGFTFNKYAMNWVRQAPGKGLEWVARIRSKYNNYATYYADSVKDRFTISRDDSKNTAYLQMNNLKTEDTAVYYCVRHGNFGNSYISYWAYWGQGTLVTVSSGGGGSGGGGSGGGGSQTVVTQEPSLTVSPGGTVTLTCGSSTGAVTSGNYPNWVQQKPGQAPRGLIGGTKFLAPGTPARFSGSLLGGKAALTLSGVQPEDEAEYYCVLWYSNRWVFGGGTKLTVL

SEQ ID NO: 498 - DNA, 1512 bp, synthetic construct
  misc_feature 1..1512: note = hCD19 26-D6 LH x I2C HL
  source 1..1512: mol_type = other DNA
gacatccagatgacccagtctccagcttctttgtctgcgtctctaggggacagagtcaccatcacctgcaaggccagccaaagtgttgattatgatggtgatagttatttgaactggtaccaacagaaaccaggaaaggcacccaaactcctcatctatgatgcatccaatctagtttctgggatcccatccaggtttagtggcagtgggtctgggacagacttcaccctcaccatcagttctctgcagcaggtggatttcgcaacctattactgtcagcaaagtactgaggatccgtggacgttcggtcaagggaccaaggtggagatcaaaggtggtggtggttctggcggcggcggctccggtggtggtggttctcaggtgcagctggtccagtctggggctgaggtgaagaagcctggggcctcagtgaaggtttcctgcaaggcttctggctatacattcactagctactggatgaactgggtgaagcagggccctggacagggtcttgagtggatgggacagatttggcctggagatggtgatactaactacaatggaaagttcaagggtagagtcactatgactgctgacgcatccaccagcacagtctacatggaactcagcagcctgcgatctgaggacactgcggtctatttctgtgcaagacgggagactacgacggtaggccgttattactatgctatggactactggggccaagggaccacggtcaccgtctcctccggaggtggtggatccgaggtgcagctggtcgagtctggaggaggattggtgcagcctggagggtcattgaaactctcatgtgcagcctctggattcaccttcaataagtacgccatgaactgggtccgccaggctccaggaaagggtttggaatgggttgctcgcataagaagtaaatataataattatgcaacatattatgccgattcagtgaaagacaggttcaccatctccagagatgattcaaaaaacactgcctatctacaaatgaacaacttgaaaactgaggacactgccgtgtactactgtgtgagacatgggaacttcggtaatagctacatatcctactgggcttactggggccaagggactctggtcaccgtctcctcaggtggtggtggttctggcggcggcggctccggtggtggtggttctcagactgttgtgactcaggaaccttcactcaccgtatcacctggtggaacagtcacactcacttgtggctcctcgactggggctgttacatctggcaactacccaaactgggtccaacaaaaaccaggtcaggcaccccgtggtctaataggtgggactaagttcctcgcccccggtactcctgccagattctcaggctccctgcttggaggcaaggctgccctcaccctctcaggggtacagccagaggatgaggcagaatattactgtgttctatggtacagcaaccgctgggtgttcggtggaggaaccaaactgactgtccta

SEQ ID NO: 499 - protein, 111 aa, synthetic construct
  REGION 1..111: note = hCD19 45-A10 L
DIQMTQSPASLSVSVGERVTITCKASQSVDYDGDSYLNWYQQKPGKAPKLLIYDASNLVSGVPPRFSGSGSGTDFTLTISSVQPEDFATYYCQQSTEDPWTFGQGTKVEIK

SEQ ID NO: 500 - DNA, 333 bp, synthetic construct
  misc_feature 1..333: note = hCD19 45-A10 L
  source 1..333: mol_type = other DNA
gacatccagatgacccagtctccagcttctttgtctgtgtctgtaggggagagagtcaccatcacctgcaaggccagccaaagtgttgattatgatggtgatagttatttgaactggtaccaacagaaaccaggaaaggcacccaaactcctcatctatgatgcatccaatctagtttctggggtcccacccaggtttagtggcagtgggtctgggacagacttcaccctcaccatcagttctgtgcagccggaggatttcgcaacctattactgtcagcaaagtactgaggatccgtggacgttcggtcaagggaccaaggtggagatcaaa

SEQ ID NO: 501 - protein, 15 aa, synthetic construct
  REGION 1..15: note = hCD19 45-A10 LCDR1
KASQSVDYDGDSYLN

SEQ ID NO: 502 - protein, 7 aa, synthetic construct
  REGION 1..7: note = hCD19 45-A10 LCDR2
DASNLVS

SEQ ID NO: 503 - protein, 9 aa, synthetic construct
  REGION 1..9: note = hCD19 45-A10 LCDR3
QQSTEDPWT

SEQ ID NO: 504 - protein, 124 aa, synthetic construct
  REGION 1..124: note = hCD19 45-A10 H
QVQLVQSGAELKKPGSSVKISCKASGYSFTSYWMNWVKQAPGQGLEWMGQIWPGDGDTNYNGKFKGKATMTADPSTSTAYMELSSLGSEDTAVYYCARRETTTVGRYYYAMDYWGQGTTVTVSS

SEQ ID NO: 505 - DNA, 372 bp, synthetic construct
  misc_feature 1..372: note = hCD19 45-A10 H
  source 1..372: mol_type = other DNA
caggtgcagctggtccagtctggggctgagctgaagaagcctgggtcctcagtgaagatttcctgcaaggcttctggctattcattcactagctactggatgaactgggtgaagcaggcccctggacagggtcttgagtggatgggacagatttggcctggagatggtgatactaactacaatggaaagttcaagggtaaagccactatgactgctgacccatccaccagcacagcctacatggaactcagcagcctgggatctgaggacactgcggtctattactgtgcaagacgggagactacgacggtaggccgttattactatgctatggactactggggccaagggaccacggtcaccgtctcctcc

SEQ ID NO: 506 - protein, 5 aa, synthetic construct
  REGION 1..5: note = hCD19 45-A10 HCDR1
SYWMN

SEQ ID NO: 507 - protein, 17 aa, synthetic construct
  REGION 1..17: note = hCD19 45-A10 HCDR2
QIWPGDGDTNYNGKFKG

SEQ ID NO: 508 - protein, 15 aa, synthetic construct
  REGION 1..15: note = hCD19 45-A10 HCDR3
RETTTVGRYYYAMDY

SEQ ID NO: 509 - protein, 504 aa, synthetic construct
  REGION 1..504: note = hCD19 45-A10 LH x I2C HL
DIQMTQSPASLSVSVGERVTITCKASQSVDYDGDSYLNWYQQKPGKAPKLLIYDASNLVSGVPPRFSGSGSGTDFTLTISSVQPEDFATYYCQQSTEDPWTFGQGTKVEIKGGGGSGGGGSGGGGSQVQLVQSGAELKKPGSSVKISCKASGYSFTSYWMNWVKQAPGQGLEWMGQIWPGDGDTNYNGKFKGKATMTADPSTSTAYMELSSLGSEDTAVYYCARRETTTVGRYYYAMDYWGQGTTVTVSSGGGGSEVQLVESGGGLVQPGGSLKLSCAASGFTFNKYAMNWVRQAPGKGLEWVARIRSKYNNYATYYADSVKDRFTISRDDSKNTAYLQMNNLKTEDTAVYYCVRHGNFGNSYISYWAYWGQGTLVTVSSGGGGSGGGGSGGGGSQTVVTQEPSLTVSPGGTVTLTCGSSTGAVTSGNYPNWVQQKPGQAPRGLIGGTKFLAPGTPARFSGSLLGGKAALTLSGVQPEDEAEYYCVLWYSNRWVFGGGTKLTVL

SEQ ID NO: 510 - DNA, 1512 bp, synthetic construct
  misc_feature 1..1512: note = hCD19 45-A10 LH x I2C HL
  source 1..1512: mol_type = other DNA
gacatccagatgacccagtctccagcttctttgtctgtgtctgtaggggagagagtcaccatcacctgcaaggccagccaaagtgttgattatgatggtgatagttatttgaactggtaccaacagaaaccaggaaaggcacccaaactcctcatctatgatgcatccaatctagtttctggggtcccacccaggtttagtggcagtgggtctgggacagacttcaccctcaccatcagttctgtgcagccggaggatttcgcaacctattactgtcagcaaagtactgaggatccgtggacgttcggtcaagggaccaaggtggagatcaaaggtggtggtggttctggcggcggcggctccggtggtggtggttctcaggtgcagctggtccagtctggggctgagctgaagaagcctgggtcctcagtgaagatttcctgcaaggcttctggctattcattcactagctactggatgaactgggtgaagcaggcccctggacagggtcttgagtggatgggacagatttggcctggagatggtgatactaactacaatggaaagttcaagggtaaagccactatgactgctgacccatccaccagcacagcctacatggaactcagcagcctgggatctgaggacactgcggtctattactgtgcaagacgggagactacgacggtaggccgttattactatgctatggactactggggccaagggaccacggtcaccgtctcctccggaggtggtggatccgaggtgcagctggtcgagtctggaggaggattggtgcagcctggagggtcattgaaactctcatgtgcagcctctggattcaccttcaataagtacgccatgaactgggtccgccaggctccaggaaagggtttggaatgggttgctcgcataagaagtaaatataataattatgcaacatattatgccgattcagtgaaagacaggttcaccatctccagagatgattcaaaaaacactgcctatctacaaatgaacaacttgaaaactgaggacactgccgtgtactactgtgtgagacatgggaacttcggtaatagctacatatcctactgggcttactggggccaagggactctggtcaccgtctcctcaggtggtggtggttctggcggcggcggctccggtggtggtggttctcagactgttgtgactcaggaaccttcactcaccgtatcacctggtggaacagtcacactcacttgtggctcctcgactggggctgttacatctggcaactacccaaactgggtccaacaaaaaccaggtcaggcaccccgtggtctaataggtgggactaagttcctcgcccccggtactcctgccagattctcaggctccctgcttggaggcaaggctgccctcaccctctcaggggtacagccagaggatgaggcagaatattactgtgttctatggtacagcaaccgctgggtgttcggtggaggaaccaaactgactgtccta

SEQ ID NO: 511 - protein, 111 aa, synthetic construct
  REGION 1..111: note = hCD19 46-B11 L
DIQMTQSPASLSASVGERVTITCKASQSVDYDGDSYLNWYQQIPGKPPKLLIYDASNLVSGIPSRFSGSGSGTDFTLTIHSLEQEDFATYYCQQSTEDPWTFGQGTKVEIK

SEQ ID NO: 512 - DNA, 333 bp, synthetic construct
  misc_feature 1..333: note = hCD19 46-B11 L
  source 1..333: mol_type = other DNA
gacatccagatgacccagtctccagcttctttgtctgcgtctgtaggggaaagagtcaccatcacctgcaaggccagccaaagtgttgattatgatggtgatagttatttgaactggtaccaacagataccaggaaagccacccaaactcctcatctatgatgcatccaatctagtttctgggatcccatccaggtttagtggcagtgggtctgggacagacttcaccctcaccatccattctctggagcaggaggatttcgcaacctattactgtcagcaaagtactgaggatccgtggacgttcggtcaagggaccaaggtggagatcaaa

SEQ ID NO: 513 - protein, 15 aa, synthetic construct
  REGION 1..15: note = hCD19 46-B11 LCDR1
KASQSVDYDGDSYLN

SEQ ID NO: 514 - protein, 7 aa, synthetic construct
  REGION 1..7: note = hCD19 46-B11 LCDR2
DASNLVS

SEQ ID NO: 515 - protein, 9 aa, synthetic construct
  REGION 1..9: note = hCD19 46-B11 LCDR3
QQSTEDPWT

SEQ ID NO: 516 - protein, 124 aa, synthetic construct
  REGION 1..124: note = hCD19 46-B11 H
QVQLVQSGAEVVRPGASVKVSCKASGYSFTSYWMNWVRQPPGQGLEWIGQIWPGDGDTNYNGKFKGRATMTADASTSTVYMELSSLRSEDTAVYYCARRETTTVGRYYYAMDYWGQGTTVTVSS

SEQ ID NO: 517 - DNA, 372 bp, synthetic construct
  misc_feature 1..372: note = hCD19 46-B11 H
  source 1..372: mol_type = other DNA
caggtgcagctggtccagtctggggctgaggtggtgaggcctggggcctcagtgaaggtttcctgcaaggcttctggctattcattcactagctactggatgaactgggtgaggcagccccctggacagggtcttgagtggattggacagatttggcctggagatggtgatactaactacaatggaaagttcaagggtagagccactatgactgctgacgcatccaccagcacagtctacatggaactcagcagcctgcgatctgaggacactgcggtctattactgtgcaagacgggagactacgacggtaggccgttattactatgctatggactactggggccaagggaccacggtcaccgtctcctcc

SEQ ID NO: 518 - protein, 5 aa, synthetic construct
  REGION 1..5: note = hCD19 46-B11 HCDR1
SYWMN

SEQ ID NO: 519 - protein, 17 aa, synthetic construct
  REGION 1..17: note = hCD19 46-B11 HCDR2
QIWPGDGDTNYNGKFKG

SEQ ID NO: 520 - protein, 15 aa, synthetic construct
  REGION 1..15: note = hCD19 46-B11 HCDR3
RETTTVGRYYYAMDY

SEQ ID NO: 521 - protein, 504 aa, synthetic construct
  REGION 1..504: note = hCD19 46-B11LH x I2C HL
DIQMTQSPASLSASVGERVTITCKASQSVDYDGDSYLNWYQQIPGKPPKLLIYDASNLVSGIPSRFSGSGSGTDFTLTIHSLEQEDFATYYCQQSTEDPWTFGQGTKVEIKGGGGSGGGGSGGGGSQVQLVQSGAEVVRPGASVKVSCKASGYSFTSYWMNWVRQPPGQGLEWIGQIWPGDGDTNYNGKFKGRATMTADASTSTVYMELSSLRSEDTAVYYCARRETTTVGRYYYAMDYWGQGTTVTVSSGGGGSEVQLVESGGGLVQPGGSLKLSCAASGFTFNKYAMNWVRQAPGKGLEWVARIRSKYNNYATYYADSVKDRFTISRDDSKNTAYLQMNNLKTEDTAVYYCVRHGNFGNSYISYWAYWGQGTLVTVSSGGGGSGGGGSGGGGSQTVVTQEPSLTVSPGGTVTLTCGSSTGAVTSGNYPNWVQQKPGQAPRGLIGGTKFLAPGTPARFSGSLLGGKAALTLSGVQPEDEAEYYCVLWYSNRWVFGGGTKLTVL

SEQ ID NO: 522 - DNA, 1512 bp, synthetic construct
  misc_feature 1..1512: note = hCD19 46-B11LH x I2C HL
  source 1..1512: mol_type = other DNA
gacatccagatgacccagtctccagcttctttgtctgcgtctgtaggggaaagagtcaccatcacctgcaaggccagccaaagtgttgattatgatggtgatagttatttgaactggtaccaacagataccaggaaagccacccaaactcctcatctatgatgcatccaatctagtttctgggatcccatccaggtttagtggcagtgggtctgggacagacttcaccctcaccatccattctctggagcaggaggatttcgcaacctattactgtcagcaaagtactgaggatccgtggacgttcggtcaagggaccaaggtggagatcaaaggtggtggtggttctggcggcggcggctccggtggtggtggttctcaggtgcagctggtccagtctggggctgaggtggtgaggcctggggcctcagtgaaggtttcctgcaaggcttctggctattcattcactagctactggatgaactgggtgaggcagccccctggacagggtcttgagtggattggacagatttggcctggagatggtgatactaactacaatggaaagttcaagggtagagccactatgactgctgacgcatccaccagcacagtctacatggaactcagcagcctgcgatctgaggacactgcggtctattactgtgcaagacgggagactacgacggtaggccgttattactatgctatggactactggggccaagggaccacggtcaccgtctcctccggaggtggtggatccgaggtgcagctggtcgagtctggaggaggattggtgcagcctggagggtcattgaaactctcatgtgcagcctctggattcaccttcaataagtacgccatgaactgggtccgccaggctccaggaaagggtttggaatgggttgctcgcataagaagtaaatataataattatgcaacatattatgccgattcagtgaaagacaggttcaccatctccagagatgattcaaaaaacactgcctatctacaaatgaacaacttgaaaactgaggacactgccgtgtactactgtgtgagacatgggaacttcggtaatagctacatatcctactgggcttactggggccaagggactctggtcaccgtctcctcaggtggtggtggttctggcggcggcggctccggtggtggtggttctcagactgttgtgactcaggaaccttcactcaccgtatcacctggtggaacagtcacactcacttgtggctcctcgactggggctgttacatctggcaactacccaaactgggtccaacaaaaaccaggtcaggcaccccgtggtctaataggtgggactaagttcctcgcccccggtactcctgccagattctcaggctccctgcttggaggcaaggctgccctcaccctctcaggggtacagccagaggatgaggcagaatattactgtgttctatggtacagcaaccgctgggtgttcggtggaggaaccaaactgactgtccta

SEQ ID NO: 523 - protein, 111 aa, synthetic construct
  REGION 1..111: note = hCD19 47-A3 L
DIQMTQSPASLSASVGERVTITCKASQSVDYDGDSYLNWYQQIPGKAPKLLIYDASNLVSGVPSRFSGSGSGTDFTLTISSLQTEDFATYYCQQSTEDPWTFGQGTKVEIK

SEQ ID NO: 524 - DNA, 333 bp, synthetic construct
  misc_feature 1..333: note = hCD19 47-A3 L
  source 1..333: mol_type = other DNA
gacatccagatgacccagtctccagcttctttgtctgcgtctgtaggggagagagtcaccatcacctgcaaggccagccaaagtgttgattatgatggtgatagttatttgaactggtaccaacagataccaggaaaggcacccaaactcctcatctatgatgcatccaatctagtttctggggtcccatccaggtttagtggcagtgggtctgggacagacttcaccctcaccatcagttctctgcagacggaggatttcgcaacctattactgtcagcaaagtactgaggatccgtggacgttcggtcaagggaccaaggtggagatcaaa

SEQ ID NO: 525 - protein, 15 aa, synthetic construct
  REGION 1..15: note = hCD19 47-A3 LCDR1
KASQSVDYDGDSYLN

SEQ ID NO: 526 - protein, 7 aa, synthetic construct
  REGION 1..7: note = hCD19 47-A3 LCDR2
DASNLVS

SEQ ID NO: 527 - protein, 9 aa, synthetic construct
  REGION 1..9: note = hCD19 47-A3 LCDR3
QQSTEDPWT

SEQ ID NO: 528 - protein, 124 aa, synthetic construct
  REGION 1..124: note = hCD19 47-A3 H
QVQLVQSGAEVKKPGASVKISCKASGYAFTSYWMNWVRQRPGQGLEWIGQIWPGDGDTNYNGKFKGRVTMTADASTSTVYMELSSLGSEDTAVYFCARRETTTVGRYYYAMDYWGQGTTVTVSS

SEQ ID NO: 529 - DNA, 372 bp, synthetic construct
  misc_feature 1..372: note = hCD19 47-A3 H
  source 1..372: mol_type = other DNA
caggtgcagctggtccagtctggggctgaggtgaagaagcctggggcctcagtgaagatttcctgcaaggcttctggctatgcattcactagctactggatgaactgggtgaggcagcgccctggacagggtcttgagtggattggacagatttggcctggagatggtgatactaactacaatggaaagttcaagggtagagtcactatgactgctgacgcatccaccagcacagtctacatggaactcagcagcctgggatctgaggacactgcggtctatttctgtgcaagacgggagactacgacggtaggccgttattactatgctatggactactggggccaagggaccacggtcaccgtctcctcc

SEQ ID NO: 530 - protein, 5 aa, synthetic construct
  REGION 1..5: note = hCD19 47-A3 HCDR1
SYWMN

SEQ ID NO: 531 - protein, 17 aa, synthetic construct
  REGION 1..17: note = hCD19 47-A3 HCDR2
QIWPGDGDTNYNGKFKG

SEQ ID NO: 532 - protein, 15 aa, synthetic construct
  REGION 1..15: note = hCD19 47-A3 HCDR3
RETTTVGRYYYAMDY

SEQ ID NO: 533 - protein, 504 aa, synthetic construct
  REGION 1..504: note = hCD19 47-A3 LH x I2C HL
DIQMTQSPASLSASVGERVTITCKASQSVDYDGDSYLNWYQQIPGKAPKLLIYDASNLVSGVPSRFSGSGSGTDFTLTISSLQTEDFATYYCQQSTEDPWTFGQGTKVEIKGGGGSGGGGSGGGGSQVQLVQSGAEVKKPGASVKISCKASGYAFTSYWMNWVRQRPGQGLEWIGQIWPGDGDTNYNGKFKGRVTMTADASTSTVYMELSSLGSEDTAVYFCARRETTTVGRYYYAMDYWGQGTTVTVSSGGGGSEVQLVESGGGLVQPGGSLKLSCAASGFTFNKYAMNWVRQAPGKGLEWVARIRSKYNNYATYYADSVKDRFTISRDDSKNTAYLQMNNLKTEDTAVYYCVRHGNFGNSYISYWAYWGQGTLVTVSSGGGGSGGGGSGGGGSQTVVTQEPSLTVSPGGTVTLTCGSSTGAVTSGNYPNWVQQKPGQAPRGLIGGTKFLAPGTPARFSGSLLGGKAALTLSGVQPEDEAEYYCVLWYSNRWVFGGGTKLTVL

SEQ ID NO: 534 - DNA, 1512 bp, synthetic construct
  misc_feature 1..1512: note = hCD19 47-A3 LH x I2C HL
  source 1..1512: mol_type = other DNA
gacatccagatgacccagtctccagcttctttgtctgcgtctgtaggggagagagtcaccatcacctgcaaggccagccaaagtgttgattatgatggtgatagttatttgaactggtaccaacagataccaggaaaggcacccaaactcctcatctatgatgcatccaatctagtttctggggtcccatccaggtttagtggcagtgggtctgggacagacttcaccctcaccatcagttctctgcagacggaggatttcgcaacctattactgtcagcaaagtactgaggatccgtggacgttcggtcaagggaccaaggtggagatcaaaggtggtggtggttctggcggcggcggctccggtggtggtggttctcaggtgcagctggtccagtctggggctgaggtgaagaagcctggggcctcagtgaagatttcctgcaaggcttctggctatgcattcactagctactggatgaactgggtgaggcagcgccctggacagggtcttgagtggattggacagatttggcctggagatggtgatactaactacaatggaaagttcaagggtagagtcactatgactgctgacgcatccaccagcacagtctacatggaactcagcagcctgggatctgaggacactgcggtctatttctgtgcaagacgggagactacgacggtaggccgttattactatgctatggactactggggccaagggaccacggtcaccgtctcctccggaggtggtggatccgaggtgcagctggtcgagtctggaggaggattggtgcagcctggagggtcattgaaactctcatgtgcagcctctggattcaccttcaataagtacgccatgaactgggtccgccaggctccaggaaagggtttggaatgggttgctcgcataagaagtaaatataataattatgcaacatattatgccgattcagtgaaagacaggttcaccatctccagagatgattcaaaaaacactgcctatctacaaatgaacaacttgaaaactgaggacactgccgtgtactactgtgtgagacatgggaacttcggtaatagctacatatcctactgggcttactggggccaagggactctggtcaccgtctcctcaggtggtggtggttctggcggcggcggctccggtggtggtggttctcagactgttgtgactcaggaaccttcactcaccgtatcacctggtggaacagtcacactcacttgtggctcctcgactggggctgttacatctggcaactacccaaactgggtccaacaaaaaccaggtcaggcaccccgtggtctaataggtgggactaagttcctcgcccccggtactcctgccagattctcaggctccctgcttggaggcaaggctgccctcaccctctcaggggtacagccagaggatgaggcagaatattactgtgttctatggtacagcaaccgctgggtgttcggtggaggaaccaaactgactgtccta

SEQ ID NO: 535 - protein, 111 aa, synthetic construct
  REGION 1..111: note = HD37-DT L
DIQLTQSPASLAVSLGQRATISCKASQSVDYDGDTYLNWYQQIPGQPPKLLIYDASNLVSGIPPRFSGSGSGTDFTLNIHPVEKVDAATYHCQQSTEDPWTFGGGTKLEIK

SEQ ID NO: 536 - DNA, 333 bp, synthetic construct
  misc_feature 1..333: note = HD37-DT L
  source 1..333: mol_type = other DNA
gatatccagctgacccagtctccagcttctttggctgtgtctctagggcagagggccaccatctcctgcaaggccagccaaagtgttgattatgatggtgatacttatttgaactggtaccaacagattccaggacagccacccaaactcctcatctatgatgcatccaatctagtttctgggatcccacccaggtttagtggcagtgggtctgggacagacttcaccctcaacatccatcctgtggagaaggtggatgctgcaacctatcactgtcagcaaagtactgaggatccgtggacgttcggtggagggaccaagctcgagatcaaa

SEQ ID NO: 537 - protein, 15 aa, synthetic construct
  REGION 1..15: note = HD37-DT LCDR1
KASQSVDYDGDTYLN

SEQ ID NO: 538 - protein, 7 aa, synthetic construct
  REGION 1..7: note = HD37-DT LCDR2
DASNLVS

SEQ ID NO: 539 - protein, 9 aa, synthetic construct
  REGION 1..9: note = HD37-DT LCDR3
QQSTEDPWT

SEQ ID NO: 540 - protein, 124 aa, synthetic construct; identical to SEQ ID NO: 476
  REGION 1..124: note = HD37-DT H

SEQ ID NO: 541 - DNA, 372 bp, synthetic construct; identical to SEQ ID NO: 477
  misc_feature 1..372: note = HD37-DT H
  source 1..372: mol_type = other DNA

SEQ ID NO: 542 - protein, 5 aa, synthetic construct
  REGION 1..5: note = HD37-DT HCDR1
SYWMN

SEQ ID NO: 543 - protein, 17 aa, synthetic construct
  REGION 1..17: note = HD37-DT HCDR2
QIWPGDGDTNYNGKFKG

SEQ ID NO: 544 - protein, 15 aa, synthetic construct
  REGION 1..15: note = HD37-DT HCDR3
RETTTVGRYYYAMDY

SEQ ID NO: 545 - protein, 504 aa, synthetic construct
  REGION 1..504: note = HD37-DT LH x I2C HL
DIQLTQSPASLAVSLGQRATISCKASQSVDYDGDTYLNWYQQIPGQPPKLLIYDASNLVSGIPPRFSGSGSGTDFTLNIHPVEKVDAATYHCQQSTEDPWTFGGGTKLEIKGGGGSGGGGSGGGGSQVQLQQSGAELVRPGSSVKISCKASGYAFSSYWMNWVKQRPGQGLEWIGQIWPGDGDTNYNGKFKGKATLTADESSSTAYMQLSSLASEDSAVYFCARRETTTVGRYYYAMDYWGQGTTVTVSSGGGGSEVQLVESGGGLVQPGGSLKLSCAASGFTFNKYAMNWVRQAPGKGLEWVARIRSKYNNYATYYADSVKDRFTISRDDSKNTAYLQMNNLKTEDTAVYYCVRHGNFGNSYISYWAYWGQGTLVTVSSGGGGSGGGGSGGGGSQTVVTQEPSLTVSPGGTVTLTCGSSTGAVTSGNYPNWVQQKPGQAPRGLIGGTKFLAPGTPARFSGSLLGGKAALTLSGVQPEDEAEYYCVLWYSNRWVFGGGTKLTVL

SEQ ID NO: 546 - DNA, 1512 bp, synthetic construct
  misc_feature 1..1512: note = HD37-DT LH x I2C HL
  source 1..1512: mol_type = other DNA
gatatccagctgacccagtctccagcttctttggctgtgtctctagggcagagggccaccatctcctgcaaggccagccaaagtgttgattatgatggtgatacttatttgaactggtaccaacagattccaggacagccacccaaactcctcatctatgatgcatccaatctagtttctgggatcccacccaggtttagtggcagtgggtctgggacagacttcaccctcaacatccatcctgtggagaaggtggatgctgcaacctatcactgtcagcaaagtactgaggatccgtggacgttcggtggagggaccaagctcgagatcaaaggtggtggtggttctggcggcggcggctccggtggtggtggttctcaggtgcagctgcagcagtctggggctgagctggtgaggcctgggtcctcagtgaagatttcctgcaaggcttctggctatgcattcagtagctactggatgaactgggtgaagcagaggcctggacagggtcttgagtggattggacagatttggcctggagatggtgatactaactacaatggaaagttcaagggtaaagccactctgactgcagacgaatcctccagcacagcctacatgcaactcagcagcctagcatctgaggactctgcggtctatttctgtgcaagacgggagactacgacggtaggccgttattactatgctatggactactggggccaagggaccacggtcaccgtctcctccggaggtggtggatccgaggtgcagctggtcgagtctggaggaggattggtgcagcctggagggtcattgaaactctcatgtgcagcctctggattcaccttcaataagtacgccatgaactgggtccgccaggctccaggaaagggtttggaatgggttgctcgcataagaagtaaatataataattatgcaacatattatgccgattcagtgaaagacaggttcaccatctccagagatgattcaaaaaacactgcctatctacaaatgaacaacttgaaaactgaggacactgccgtgtactactgtgtgagacatgggaacttcggtaatagctacatatcctactgggcttactggggccaagggactctggtcaccgtctcctcaggtggtggtggttctggcggcggcggctccggtggtggtggttctcagactgttgtgactcaggaaccttcactcaccgtatcacctggtggaacagtcacactcacttgtggctcctcgactggggctgttacatctggcaactacccaaactgggtccaacaaaaaccaggtcaggcaccccgtggtctaataggtgggactaagttcctcgcccccggtactcctgccagattctcaggctccctgcttggaggcaaggctgccctcaccctctcaggggtacagccagaggatgaggcagaatattactgtgttctatggtacagcaaccgctgggtgttcggtggaggaaccaaactgactgtccta

SEQ ID NO: 547 - protein, 111 aa, synthetic construct
  REGION 1..111: note = HD37-A L
DIQLTQSPASLAVSLGQRATISCKASQSVDYDGASYLNWYQQIPGQPPKLLIYDASNLVSGIPPRFSGSGSGTDFTLNIHPVEKVDAATYHCQQSTEDPWTFGGGTKLEIK

SEQ ID NO: 548 - DNA, 333 bp, synthetic construct
  misc_feature 1..333: note = HD37-A L
  source 1..333: mol_type = other DNA
gatatccagctgacccagtctccagcttctttggctgtgtctctagggcagagggccaccatctcctgcaaggccagccaaagtgttgattatgatggtgctagttatttgaactggtaccaacagattccaggacagccacccaaactcctcatctatgatgcatccaatctagtttctgggatcccacccaggtttagtggcagtgggtctgggacagacttcaccctcaacatccatcctgtggagaaggtggatgctgcaacctatcactgtcagcaaagtactgaggatccgtggacgttcggtggagggaccaagctcgagatcaaa

SEQ ID NO: 549 - protein, 15 aa, synthetic construct
  REGION 1..15: note = HD37-A LCDR1
KASQSVDYDGASYLN

SEQ ID NO: 550 - protein, 7 aa, synthetic construct
  REGION 1..7: note = HD37-A LCDR2
DASNLVS

SEQ ID NO: 551 - protein, 9 aa, synthetic construct
  REGION 1..9: note = HD37-A LCDR3
QQSTEDPWT

SEQ ID NO: 552 - protein, 124 aa, synthetic construct; identical to SEQ ID NO: 476
  REGION 1..124: note = HD37-A H

SEQ ID NO: 553 - DNA, 372 bp, synthetic construct; identical to SEQ ID NO: 477
  misc_feature 1..372: note = HD37-A H
  source 1..372: mol_type = other DNA

SEQ ID NO: 554 - protein, 5 aa, synthetic construct
  REGION 1..5: note = HD37-A HCDR1
SYWMN

SEQ ID NO: 555 - protein, 17 aa, synthetic construct
  REGION 1..17: note = HD37-A HCDR2
QIWPGDGDTNYNGKFKG

SEQ ID NO: 556 - protein, 15 aa, synthetic construct
  REGION 1..15: note = HD37-A HCDR3
RETTTVGRYYYAMDY

SEQ ID NO: 557 - protein, 504 aa, synthetic construct
  REGION 1..504: note = HD37-A LH x I2C HL
DIQLTQSPASLAVSLGQRATISCKASQSVDYDGASYLNWYQQIPGQPPKLLIYDASNLVSGIPPRFSGSGSGTDFTLNIHPVEKVDAATYHCQQSTEDPWTFGGGTKLEIKGGGGSGGGGSGGGGSQVQLQQSGAELVRPGSSVKISCKASGYAFSSYWMNWVKQRPGQGLEWIGQIWPGDGDTNYNGKFKGKATLTADESSSTAYMQLSSLASEDSAVYFCARRETTTVGRYYYAMDYWGQGTTVTVSSGGGGSEVQLVESGGGLVQPGGSLKLSCAASGFTFNKYAMNWVRQAPGKGLEWVARIRSKYNNYATYYADSVKDRFTISRDDSKNTAYLQMNNLKTEDTAVYYCVRHGNFGNSYISYWAYWGQGTLVTVSSGGGGSGGGGSGGGGSQTVVTQEPSLTVSPGGTVTLTCGSSTGAVTSGNYPNWVQQKPGQAPRGLIGGTKFLAPGTPARFSGSLLGGKAALTLSGVQPEDEAEYYCVLWYSNRWVFGGGTKLTVL

SEQ ID NO: 558 - DNA, 1512 bp, synthetic construct
  misc_feature 1..1512: note = HD37-A LH x I2C HL
  source 1..1512: mol_type = other DNA
gatatccagctgacccagtctccagcttctttggctgtgtctctagggcagagggccaccatctcctgcaaggccagccaaagtgttgattatgatggtgctagttatttgaactggtaccaacagattccaggacagccacccaaactcctcatctatgatgcatccaatctagtttctgggatcccacccaggtttagtggcagtgggtctgggacagacttcaccctcaacatccatcctgtggagaaggtggatgctgcaacctatcactgtcagcaaagtactgaggatccgtggacgttcggtggagggaccaagctcgagatcaaaggtggtggtggttctggcggcggcggctccggtggtggtggttctcaggtgcagctgcagcagtctggggctgagctggtgaggcctgggtcctcagtgaagatttcctgcaaggcttctggctatgcattcagtagctactggatgaactgggtgaagcagaggcctggacagggtcttgagtggattggacagatttggcctggagatggtgatactaactacaatggaaagttcaagggtaaagccactctgactgcagacgaatcctccagcacagcctacatgcaactcagcagcctagcatctgaggactctgcggtctatttctgtgcaagacgggagactacgacggtaggccgttattactatgctatggactactggggccaagggaccacggtcaccgtctcctccggaggtggtggatccgaggtgcagctggtcgagtctggaggaggattggtgcagcctggagggtcattgaaactctcatgtgcagcctctggattcaccttcaataagtacgccatgaactgggtccgccaggctccaggaaagggtttggaatgggttgctcgcataagaagtaaatataataattatgcaacatattatgccgattcagtgaaagacaggttcaccatctccagagatgattcaaaaaacactgcctatctacaaatgaacaacttgaaaactgaggacactgccgtgtactactgtgtgagacatgggaacttcggtaatagctacatatcctactgggcttactggggccaagggactctggtcaccgtctcctcaggtggtggtggttctggcggcggcggctccggtggtggtggttctcagactgttgtgactcaggaaccttcactcaccgtatcacctggtggaacagtcacactcacttgtggctcctcgactggggctgttacatctggcaactacccaaactgggtccaacaaaaaccaggtcaggcaccccgtggtctaataggtgggactaagttcctcgcccccggtactcctgccagattctcaggctccctgcttggaggcaaggctgccctcaccctctcaggggtacagccagaggatgaggcagaatattactgtgttctatggtacagcaaccgctgggtgttcggtggaggaaccaaactgactgtccta

SEQ ID NO: 559 - protein, 111 aa, synthetic construct
  REGION 1..111: note = HD37-G L
DIQLTQSPASLAVSLGQRATISCKASQSVDYDGGSYLNWYQQIPGQPPKLLIYDASNLVSGIPPRFSGSGSGTDFTLNIHPVEKVDAATYHCQQSTEDPWTFGGGTKLEIK

SEQ ID NO: 560 - DNA, 333 bp, synthetic construct
  misc_feature 1..333: note = HD37-G L
  source 1..333: mol_type = other DNA
gatatccagctgacccagtctccagcttctttggctgtgtctctagggcagagggccaccatctcctgcaaggccagccaaagtgttgattatgatggtggtagttatttgaactggtaccaacagattccaggacagccacccaaactcctcatctatgatgcatccaatctagtttctgggatcccacccaggtttagtggcagtgggtctgggacagacttcaccctcaacatccatcctgtggagaaggtggatgctgcaacctatcactgtcagcaaagtactgaggatccgtggacgttcggtggagggaccaagctcgagatcaaa

SEQ ID NO: 561 - protein, 15 aa, synthetic construct
  REGION 1..15: note = HD37-G LCDR1
KASQSVDYDGGSYLN

SEQ ID NO: 562 - protein, 7 aa, synthetic construct
  REGION 1..7: note = HD37-G LCDR2
DASNLVS

SEQ ID NO: 563 - protein, 9 aa, synthetic construct
  REGION 1..9: note = HD37-G LCDR3
QQSTEDPWT

SEQ ID NO: 564 - protein, 124 aa, synthetic construct; identical to SEQ ID NO: 476
  REGION 1..124: note = HD37-G H

SEQ ID NO: 565 - DNA, 372 bp, synthetic construct; identical to SEQ ID NO: 477
  misc_feature 1..372: note = HD37-G H
  source 1..372: mol_type = other DNA

SEQ ID NO: 566 - protein, 5 aa, synthetic construct
  REGION 1..5: note = HD37-G HCDR1
SYWMN

SEQ ID NO: 567 - protein, 17 aa, synthetic construct
  REGION 1..17: note = HD37-G HCDR2
QIWPGDGDTNYNGKFKG

SEQ ID NO: 568 - protein, 15 aa, synthetic construct
  REGION 1..15: note = HD37-G HCDR3
RETTTVGRYYYAMDY

SEQ ID NO: 569 - protein, 504 aa, synthetic construct
  REGION 1..504: note = HD37-G LH x I2C HL
DIQLTQSPASLAVSLGQRATISCKASQSVDYDGGSYLNWYQQIPGQPPKLLIYDASNLVSGIPPRFSGSGSGTDFTLNIHPVEKVDAATYHCQQSTEDPWTFGGGTKLEIKGGGGSGGGGSGGGGSQVQLQQSGAELVRPGSSVKISCKASGYAFSSYWMNWVKQRPGQGLEWIGQIWPGDGDTNYNGKFKGKATLTADESSSTAYMQLSSLASEDSAVYFCARRETTTVGRYYYAMDYWGQGTTVTVSSGGGGSEVQLVESGGGLVQPGGSLKLSCAASGFTFNKYAMNWVRQAPGKGLEWVARIRSKYNNYATYYADSVKDRFTISRDDSKNTAYLQMNNLKTEDTAVYYCVRHGNFGNSYISYWAYWGQGTLVTVSSGGGGSGGGGSGGGGSQTVVTQEPSLTVSPGGTVTLTCGSSTGAVTSGNYPNWVQQKPGQAPRGLIGGTKFLAPGTPARFSGSLLGGKAALTLSGVQPEDEAEYYCVLWYSNRWVFGGGTKLTVL

SEQ ID NO: 570 - DNA, 1512 bp, synthetic construct
  misc_feature 1..1512: note = HD37-G LH x I2C HL
  source 1..1512: mol_type = other DNA
gatatccagctgacccagtctccagcttctttggctgtgtctctagggcagagggccaccatctcctgcaaggccagccaaagtgttgattatgatggtggtagttatttgaactggtaccaacagattccaggacagccacccaaactcctcatctatgatgcatccaatctagtttctgggatcccacccaggtttagtggcagtgggtctgggacagacttcaccctcaacatccatcctgtggagaaggtggatgctgcaacctatcactgtcagcaaagtactgaggatccgtggacgttcggtggagggaccaagctcgagatcaaaggtggtggtggttctggcggcggcggctccggtggtggtggttctcaggtgcagctgcagcagtctggggctgagctggtgaggcctgggtcctcagtgaagatttcctgcaaggcttctggctatgcattcagtagctactggatgaactgggtgaagcagaggcctggacagggtcttgagtggattggacagatttggcctggagatggtgatactaactacaatggaaagttcaagggtaaagccactctgactgcagacgaatcctccagcacagcctacatgcaactcagcagcctagcatctgaggactctgcggtctatttctgtgcaagacgggagactacgacggtaggccgttattactatgctatggactactggggccaagggaccacggtcaccgtctcctccggaggtggtggatccgaggtgcagctggtcgagtctggaggaggattggtgcagcctggagggtcattgaaactctcatgtgcagcctctggattcaccttcaataagtacgccatgaactgggtccgccaggctccaggaaagggtttggaatgggttgctcgcataagaagtaaatataataattatgcaacatattatgccgattcagtgaaagacaggttcaccatctccagagatgattcaaaaaacactgcctatctacaaatgaacaacttgaaaactgaggacactgccgtgtactactgtgtgagacatgggaacttcggtaatagctacatatcctactgggcttactggggccaagggactctggtcaccgtctcctcaggtggtggtggttctggcggcggcggctccggtggtggtggttctcagactgttgtgactcaggaaccttcactcaccgtatcacctggtggaacagtcacactcacttgtggctcctcgactggggctgttacatctggcaactacccaaactgggtccaacaaaaaccaggtcaggcaccccgtggtctaataggtgggactaagttcctcgcccccggtactcctgccagattctcaggctccctgcttggaggcaaggctgccctcaccctctcaggggtacagccagaggatgaggcagaatattactgtgttctatggtacagcaaccgctgggtgttcggtggaggaaccaaactgactgtccta

SEQ ID NO: 571 - protein, 111 aa, synthetic construct
  REGION 1..111: note = HD37-S L
DIQLTQSPASLAVSLGQRATISCKASQSVDYDGSSYLNWYQQIPGQPPKLLIYDASNLVSGIPPRFSGSGSGTDFTLNIHPVEKVDAATYHCQQSTEDPWTFGGGTKLEIK

SEQ ID NO: 572 - DNA, 333 bp, synthetic construct
  misc_feature 1..333: note = HD37-S L
  source 1..333: mol_type = other DNA
gatatccagctgacccagtctccagcttctttggctgtgtctctagggcagagggccaccatctcctgcaaggccagccaaagtgttgattatgatggttctagttatttgaactggtaccaacagattccaggacagccacccaaactcctcatctatgatgcatccaatctagtttctgggatcccacccaggtttagtggcagtgggtctgggacagacttcaccctcaacatccatcctgtggagaaggtggatgctgcaacctatcactgtcagcaaagtactgaggatccgtggacgttcggtggagggaccaagctcgagatcaaa

SEQ ID NO: 573 - protein, 15 aa, synthetic construct
  REGION 1..15: note = HD37-S LCDR1
KASQSVDYDGSSYLN

SEQ ID NO: 574 - protein, 7 aa, synthetic construct
  REGION 1..7: note = HD37-S LCDR2
DASNLVS

SEQ ID NO: 575 - protein, 9 aa, synthetic construct
  REGION 1..9: note = HD37-S LCDR3
QQSTEDPWT

SEQ ID NO: 576 - protein, 124 aa, synthetic construct; identical to SEQ ID NO: 476
  REGION 1..124: note = HD37-S H

SEQ ID NO: 577 - DNA, 372 bp, synthetic construct; identical to SEQ ID NO: 477
  misc_feature 1..372: note = HD37-S H
  source 1..372: mol_type = other DNA

SEQ ID NO: 578 - protein, 5 aa, synthetic construct
  REGION 1..5: note = HD37-S HCDR1
SYWMN

SEQ ID NO: 579 - protein, 17 aa, synthetic construct
  REGION 1..17: note = HD37-S HCDR2
QIWPGDGDTNYNGKFKG

SEQ ID NO: 580 - protein, 15 aa, synthetic construct
  REGION 1..15: note = HD37-S HCDR3
RETTTVGRYYYAMDY

SEQ ID NO: 581 - protein, 504 aa, synthetic construct
  REGION 1..504: note = HD37-S LH x I2C HL
DIQLTQSPASLAVSLGQRATISCKASQSVDYDGSSYLNWYQQIPGQPPKLLIYDASNLVSGIPPRFSGSGSGTDFTLNIHPVEKVDAATYHCQQSTEDPWTFGGGTKLEIKGGGGSGGGGSGGGGSQVQLQQSGAELVRPGSSVKISCKASGYAFSSYWMNWVKQRPGQGLEWIGQIWPGDGDTNYNGKFKGKATLTADESSSTAYMQLSSLASEDSAVYFCARRETTTVGRYYYAMDYWGQGTTVTVSSGGGGSEVQLVESGGGLVQPGGSLKLSCAASGFTFNKYAMNWVRQAPGKGLEWVARIRSKYNNYATYYADSVKDRFTISRDDSKNTAYLQMNNLKTEDTAVYYCVRHGNFGNSYISYWAYWGQGTLVTVSSGGGGSGGGGSGGGGSQTVVTQEPSLTVSPGGTVTLTCGSSTGAVTSGNYPNWVQQKPGQAPRGLIGGTKFLAPGTPARFSGSLLGGKAALTLSGVQPEDEAEYYCVLWYSNRWVFGGGTKLTVL

SEQ ID NO: 582 - protein, 1512 aa, synthetic construct
  REGION 1..1512: note = HD37-S LH x I2C HL
GATATCCAGCTGACCCAGTCTCCAGCTTCTTTGGCTGTGTCTCTAGGGCAGAGGGCCACCATCTCCTGCAAGGCCAGCCAAAGTGTTGATTATGATGGTTCTAGTTATTTGAACTGGTACCAACAGATTCCAGGACAGCCACCCAAACTCCTCATCTATGATGCATCCAATCTAGTTTCTGGGATCCCACCCAGGTTTAGTGGCAGTGGGTCTGGGACAGACTTCACCCTCAACATCCATCCTGTGGAGAAGGTGGATGCTGCAACCTATCACTGTCAGCAAAGTACTGAGGATCCGTGGACGTTCGGTGGAGGGACCAAGCTCGAGATCAAAGGTGGTGGTGGTTCTGGCGGCGGCGGCTCCGGTGGTGGTGGTTCTCAGGTGCAGCTGCAGCAGTCTGGGGCTGAGCTGGTGAGGCCTGGGTCCTCAGTGAAGATTTCCTGCAAGGCTTCTGGCTATGCATTCAGTAGCTACTGGATGAACTGGGTGAAGCAGAGGCCTGGACAGGGTCTTGAGTGGATTGGACAGATTTGGCCTGGAGATGGTGATACTAACTACAATGGAAAGTTCAAGGGTAAAGCCACTCTGACTGCAGACGAATCCTCCAGCACAGCCTACATGCAACTCAGCAGCCTAGCATCTGAGGACTCTGCGGTCTATTTCTGTGCAAGACGGGAGACTACGACGGTAGGCCGTTATTACTATGCTATGGACTACTGGGGCCAAGGGACCACGGTCACCGTCTCCTCCGGAGGTGGTGGATCCGAGGTGCAGCTGGTCGAGTCTGGAGGAGGATTGGTGCAGCCTGGAGGGTCATTGAAACTCTCATGTGCAGCCTCTGGATTCACCTTCAATAAGTACGCCATGAACTGGGTCCGCCAGGCTCCAGGAAAGGGTTTGGAATGGGTTGCTCGCATAAGAAGTAAATATAATAATTATGCAACATATTATGCCGATTCAGTGAAAGACAGGTTCACCATCTCCAGAGATGATTCAAAAAACACTGCCTATCTACAAATGAACAACTTGAAAACTGAGGACACTGCCGTGTACTACTGTGTGAGACATGGGAACTTCGGTAATAGCTACATATCCTACTGGGCTTACTGGGGCCAAGGGACTCTGGTCACCGTCTCCTCAGGTGGTGGTGGTTCTGGCGGCGGCGGCTCCGGTGGTGGTGGTTCTCAGACTGTTGTGACTCAGGAACCTTCACTCACCGTATCACCTGGTGGAACAGTCACACTCACTTGTGGCTCCTCGACTGGGGCTGTTACATCTGGCAACTACCCAAACTGGGTCCAACAAAAACCAGGTCAGGCACCCCGTGGTCTAATAGGTGGGACTAAGTTCCTCGCCCCCGGTACTCCTGCCAGATTCTCAGGCTCCCTGCTTGGAGGCAAGGCTGCCCTCACCCTCTCAGGGGTACAGCCAGAGGATGAGGCAGAATATTACTGTGTTCTATGGTACAGCAACCGCTGGGTGTTCGGTGGAGGAACCAAACTGACTGTCCTA

SEQ ID NO: 583 - protein, 111 aa, synthetic construct
  REGION 1..111: note = HD37-T L
DIQLTQSPASLAVSLGQRATISCKASQSVDYDGTSYLNWYQQIPGQPPKLLIYDASNLVSGIPPRFSGSGSGTDFTLNIHPVEKVDAATYHCQQSTEDPWTFGGGTKLEIK

SEQ ID NO: 584 - DNA, 333 bp, synthetic construct
  misc_feature 1..333: note = HD37-T L
  source 1..333: mol_type = other DNA
gatatccagctgacccagtctccagcttctttggctgtgtctctagggcagagggccaccatctcctgcaaggccagccaaagtgttgattatgatggtacaagttatttgaactggtaccaacagattccaggacagccacccaaactcctcatctatgatgcatccaatctagtttctgggatcccacccaggtttagtggcagtgggtctgggacagacttcaccctcaacatccatcctgtggagaaggtggatgctgcaacctatcactgtcagcaaagtactgaggatccgtggacgttcggtggagggaccaagctcgagatcaaa

SEQ ID NO: 585 - protein, 15 aa, synthetic construct
  REGION 1..15: note = HD37-T LCDR1
KASQSVDYDGTSYLN

SEQ ID NO: 586 - protein, 7 aa, synthetic construct
  REGION 1..7: note = HD37-T LCDR2
DASNLVS

SEQ ID NO: 587 - protein, 9 aa, synthetic construct
  REGION 1..9: note = HD37-T LCDR3
QQSTEDPWT

SEQ ID NO: 588 - protein, 124 aa, synthetic construct; identical to SEQ ID NO: 476
  REGION 1..124: note = HD37-T H

SEQ ID NO: 589 - DNA, 372 bp, synthetic construct; identical to SEQ ID NO: 477
  misc_feature 1..372: note = HD37-T H
  source 1..372: mol_type = other DNA

SEQ ID NO: 590 - protein, 5 aa, synthetic construct
  REGION 1..5: note = HD37-T HCDR1
SYWMN

SEQ ID NO: 591 - protein, 17 aa, synthetic construct
  REGION 1..17: note = HD37-T HCDR2
QIWPGDGDTNYNGKFKG

SEQ ID NO: 592 - protein, 15 aa, synthetic construct
  REGION 1..15: note = HD37-T HCDR3
RETTTVGRYYYAMDY

SEQ ID NO: 593 - protein, 504 aa, synthetic construct
  REGION 1..504: note = HD37-T LH x I2C HL
DIQLTQSPASLAVSLGQRATISCKASQSVDYDGTSYLNWYQQIPGQPPKLLIYDASNLVSGIPPRFSGSGSGTDFTLNIHPVEKVDAATYHCQQSTEDPWTFGGGTKLEIKGGGGSGGGGSGGGGSQVQLQQSGAELVRPGSSVKISCKASGYAFSSYWMNWVKQRPGQGLEWIGQIWPGDGDTNYNGKFKGKATLTADESSSTAYMQLSSLASEDSAVYFCARRETTTVGRYYYAMDYWGQGTTVTVSSGGGGSEVQLVESGGGLVQPGGSLKLSCAASGFTFNKYAMNWVRQAPGKGLEWVARIRSKYNNYATYYADSVKDRFTISRDDSKNTAYLQMNNLKTEDTAVYYCVRHGNFGNSYISYWAYWGQGTLVTVSSGGGGSGGGGSGGGGSQTVVTQEPSLTVSPGGTVTLTCGSSTGAVTSGNYPNWVQQKPGQAPRGLIGGTKFLAPGTPARFSGSLLGGKAALTLSGVQPEDEAEYYCVLWYSNRWVFGGGTKLTVL

SEQ ID NO: 594 - DNA, 1512 bp, synthetic construct
  misc_feature 1..1512: note = HD37-T LH x I2C HL
  source 1..1512: mol_type = other DNA
gatatccagctgacccagtctccagcttctttggctgtgtctctagggcagagggccaccatctcctgcaaggccagccaaagtgttgattatgatggtacaagttatttgaactggtaccaacagattccaggacagccacccaaactcctcatctatgatgcatccaatctagtttctgggatcccacccaggtttagtggcagtgggtctgggacagacttcaccctcaacatccatcctgtggagaaggtggatgctgcaacctatcactgtcagcaaagtactgaggatccgtggacgttcggtggagggaccaagctcgagatcaaaggtggtggtggttctggcggcggcggctccggtggtggtggttctcaggtgcagctgcagcagtctggggctgagctggtgaggcctgggtcctcagtgaagatttcctgcaaggcttctggctatgcattcagtagctactggatgaactgggtgaagcagaggcctggacagggtcttgagtggattggacagatttggcctggagatggtgatactaactacaatggaaagttcaagggtaaagccactctgactgcagacgaatcctccagcacagcctacatgcaactcagcagcctagcatctgaggactctgcggtctatttctgtgcaagacgggagactacgacggtaggccgttattactatgctatggactactggggccaagggaccacggtcaccgtctcctccggaggtggtggatccgaggtgcagctggtcgagtctggaggaggattggtgcagcctggagggtcattgaaactctcatgtgcagcctctggattcaccttcaataagtacgccatgaactgggtccgccaggctccaggaaagggtttggaatgggttgctcgcataagaagtaaatataataattatgcaacatattatgccgattcagtgaaagacaggttcaccatctccagagatgattcaaaaaacactgcctatctacaaatgaacaacttgaaaactgaggacactgccgtgtactactgtgtgagacatgggaacttcggtaatagctacatatcctactgggcttactggggccaagggactctggtcaccgtctcctcaggtggtggtggttctggcggcggcggctccggtggtggtggttctcagactgttgtgactcaggaaccttcactcaccgtatcacctggtggaacagtcacactcacttgtggctcctcgactggggctgttacatctggcaactacccaaactgggtccaacaaaaaccaggtcaggcaccccgtggtctaataggtgggactaagttcctcgcccccggtactcctgccagattctcaggctccctgcttggaggcaaggctgccctcaccctctcaggggtacagccagaggatgaggcagaatattactgtgttctatggtacagcaaccgctgggtgttcggtggaggaaccaaactgactgtccta

SEQ ID NO: 595 - protein, 111 aa, synthetic construct
  REGION 1..111: note = HD37-I L
DIQLTQSPASLAVSLGQRATISCKASQSVDYDGISYLNWYQQIPGQPPKLLIYDASNLVSGIPPRFSGSGSGTDFTLNIHPVEKVDAATYHCQQSTEDPWTFGGGTKLEIK

SEQ ID NO: 596 - DNA, 333 bp, synthetic construct
  misc_feature 1..333: note = HD37-I L
  source 1..333: mol_type = other DNA
gatatccagctgacccagtctccagcttctttggctgtgtctctagggcagagggccaccatctcctgcaaggccagccaaagtgttgattatgatggtatcagttatttgaactggtaccaacagattccaggacagccacccaaactcctcatctatgatgcatccaatctagtttctgggatcccacccaggtttagtggcagtgggtctgggacagacttcaccctcaacatccatcctgtggagaaggtggatgctgcaacctatcactgtcagcaaagtactgaggatccgtggacgttcggtggagggaccaagctcgagatcaaa

SEQ ID NO: 597 - protein, 15 aa, synthetic construct
  REGION 1..15: note = HD37-I LCDR1
KASQSVDYDGISYLN

SEQ ID NO: 598 - protein, 7 aa, synthetic construct
  REGION 1..7: note = HD37-I LCDR2
DASNLVS

SEQ ID NO: 599 - protein, 9 aa, synthetic construct
  REGION 1..9: note = HD37-I LCDR3
QQSTEDPWT

SEQ ID NO: 600 - protein, 124 aa, synthetic construct; identical to SEQ ID NO: 476
  REGION 1..124: note = HD37-I H

SEQ ID NO: 601 - DNA, 372 bp, synthetic construct; identical to SEQ ID NO: 477
  misc_feature 1..372: note = HD37-I H
  source 1..372: mol_type = other DNA

SEQ ID NO: 602 - protein, 5 aa, synthetic construct
  REGION 1..5: note = HD37-I HCDR1
SYWMN

SEQ ID NO: 603 - protein, 17 aa, synthetic construct
  REGION 1..17: note = HD37-I HCDR2
QIWPGDGDTNYNGKFKG

SEQ ID NO: 604 - protein, 15 aa, synthetic construct
  REGION 1..15: note = HD37-I HCDR3
RETTTVGRYYYAMDY

SEQ ID NO: 605 - protein, 504 aa, synthetic construct
  REGION 1..504: note = HD37-I LH x I2C HL
DIQLTQSPASLAVSLGQRATISCKASQSVDYDGISYLNWYQQIPGQPPKLLIYDASNLVSGIPPRFSGSGSGTDFTLNIHPVEKVDAATYHCQQSTEDPWTFGGGTKLEIKGGGGSGGGGSGGGGSQVQLQQSGAELVRPGSSVKISCKASGYAFSSYWMNWVKQRPGQGLEWIGQIWPGDGDTNYNGKFKGKATLTADESSSTAYMQLSSLASEDSAVYFCARRETTTVGRYYYAMDYWGQGTTVTVSSGGGGSEVQLVESGGGLVQPGGSLKLSCAASGFTFNKYAMNWVRQAPGKGLEWVARIRSKYNNYATYYADSVKDRFTISRDDSKNTAYLQMNNLKTEDTAVYYCVRHGNFGNSYISYWAYWGQGTLVTVSSGGGGSGGGGSGGGGSQTVVTQEPSLTVSPGGTVTLTCGSSTGAVTSGNYPNWVQQKPGQAPRGLIGGTKFLAPGTPARFSGSLLGGKAALTLSGVQPEDEAEYYCVLWYSNRWVFGGGTKLTVL

SEQ ID NO: 606 - DNA, 1512 bp, synthetic construct
  misc_feature 1..1512: note = HD37-I LH x I2C HL
  source 1..1512: mol_type = other DNA
gatatccagctgacccagtctccagcttctttggctgtgtctctagggcagagggccaccatctcctgcaaggccagccaaagtgttgattatgatggtatcagttatttgaactggtaccaacagattccaggacagccacccaaactcctcatctatgatgcatccaatctagtttctgggatcccacccaggtttagtggcagtgggtctgggacagacttcaccctcaacatccatcctgtggagaaggtggatgctgcaacctatcactgtcagcaaagtactgaggatccgtggacgttcggtggagggaccaagctcgagatcaaaggtggtggtggttctggcggcggcggctccggtggtggtggttctcaggtgcagctgcagcagtctggggctgagctggtgaggcctgggtcctcagtgaagatttcctgcaaggcttctggctatgcattcagtagctactggatgaactgggtgaagcagaggcctggacagggtcttgagtggattggacagatttggcctggagatggtgatactaactacaatggaaagttcaagggtaaagccactctgactgcagacgaatcctccagcacagcctacatgcaactcagcagcctagcatctgaggactctgcggtctatttctgtgcaagacgggagactacgacggtaggccgttattactatgctatggactactggggccaagggaccacggtcaccgtctcctccggaggtggtggatccgaggtgcagctggtcgagtctggaggaggattggtgcagcctggagggtcattgaaactctcatgtgcagcctctggattcaccttcaataagtacgccatgaactgggtccgccaggctccaggaaagggtttggaatgggttgctcgcataagaagtaaatataataattatgcaacatattatgccgattcagtgaaagacaggttcaccatctccagagatgattcaaaaaacactgcctatctacaaatgaacaacttgaaaactgaggacactgccgtgtactactgtgtgagacatgggaacttcggtaatagctacatatcctactgggcttactggggccaagggactctggtcaccgtctcctcaggtggtggtggttctggcggcggcggctccggtggtggtggttctcagactgttgtgactcaggaaccttcactcaccgtatcacctggtggaacagtcacactcacttgtggctcctcgactggggctgttacatctggcaactacccaaactgggtccaacaaaaaccaggtcaggcaccccgtggtctaataggtgggactaagttcctcgcccccggtactcctgccagattctcaggctccctgcttggaggcaaggctgccctcaccctctcaggggtacagccagaggatgaggcagaatattactgtgttctatggtacagcaaccgctgggtgttcggtggaggaaccaaactgactgtccta

SEQ ID NO: 607 - protein, 111 aa, synthetic construct
  REGION 1..111: note = HD37-L L
DIQLTQSPASLAVSLGQRATISCKASQSVDYDGLSYLNWYQQIPGQPPKLLIYDASNLVSGIPPRFSGSGSGTDFTLNIHPVEKVDAATYHCQQSTEDPWTFGGGTKLEIK

SEQ ID NO: 608 - DNA, 333 bp, synthetic construct
  misc_feature 1..333: note = HD37-L L
  source 1..333: mol_type = other DNA
gatatccagctgacccagtctccagcttctttggctgtgtctctagggcagagggccaccatctcctgcaaggccagccaaagtgttgattatgatggtctgagttatttgaactggtaccaacagattccaggacagccacccaaactcctcatctatgatgcatccaatctagtttctgggatcccacccaggtttagtggcagtgggtctgggacagacttcaccctcaacatccatcctgtggagaaggtggatgctgcaacctatcactgtcagcaaagtactgaggatccgtggacgttcggtggagggaccaagctcgagatcaaa

SEQ ID NO: 609 - protein, 15 aa, synthetic construct
  REGION 1..15: note = HD37-L LCDR1
KASQSVDYDGLSYLN

SEQ ID NO: 610 - protein, 7 aa, synthetic construct
  REGION 1..7: note = HD37-L LCDR2
DASNLVS

SEQ ID NO: 611 - protein, 9 aa, synthetic construct
  REGION 1..9: note = HD37-L LCDR3
QQSTEDPWT

SEQ ID NO: 612 - protein, 124 aa, synthetic construct; identical to SEQ ID NO: 476
  REGION 1..124: note = HD37-L H

SEQ ID NO: 613 - DNA, 372 bp, synthetic construct; identical to SEQ ID NO: 477
  misc_feature 1..372: note = HD37-L H
  source 1..372: mol_type = other DNA

SEQ ID NO: 614 - protein, 5 aa, synthetic construct
  REGION 1..5: note = HD37-L HCDR1
SYWMN

SEQ ID NO: 615 - protein, 17 aa, synthetic construct
  REGION 1..17: note = HD37-L HCDR2
QIWPGDGDTNYNGKFKG

SEQ ID NO: 616 - protein, 15 aa, synthetic construct
  REGION 1..15: note = HD37-L HCDR3
RETTTVGRYYYAMDY

SEQ ID NO: 617 - protein, 504 aa, synthetic construct
  REGION 1..504: note = HD37-L LH x I2C HL
DIQLTQSPASLAVSLGQRATISCKASQSVDYDGLSYLNWYQQIPGQPPKLLIYDASNLVSGIPPRFSGSGSGTDFTLNIHPVEKVDAATYHCQQSTEDPWTFGGGTKLEIKGGGGSGGGGSGGGGSQVQLQQSGAELVRPGSSVKISCKASGYAFSSYWMNWVKQRPGQGLEWIGQIWPGDGDTNYNGKFKGKATLTADESSSTAYMQLSSLASEDSAVYFCARRETTTVGRYYYAMDYWGQGTTVTVSSGGGGSEVQLVESGGGLVQPGGSLKLSCAASGFTFNKYAMNWVRQAPGKGLEWVARIRSKYNNYATYYADSVKDRFTISRDDSKNTAYLQMNNLKTEDTAVYYCVRHGNFGNSYISYWAYWGQGTLVTVSSGGGGSGGGGSGGGGSQTVVTQEPSLTVSPGGTVTLTCGSSTGAVTSGNYPNWVQQKPGQAPRGLIGGTKFLAPGTPARFSGSLLGGKAALTLSGVQPEDEAEYYCVLWYSNRWVFGGGTKLTVL

SEQ ID NO: 618 - DNA, 1512 bp, synthetic construct
  misc_feature 1..1512: note = HD37-L LH x I2C HL
  source 1..1512: mol_type = other DNA
gatatccagctgacccagtctccagcttctttggctgtgtctctagggcagagggccaccatctcctgcaaggccagccaaagtgttgattatgatggtctgagttatttgaactggtaccaacagattccaggacagccacccaaactcctcatctatgatgcatccaatctagtttctgggatcccacccaggtttagtggcagtgggtctgggacagacttcaccctcaacatccatcctgtggagaaggtggatgctgcaacctatcactgtcagcaaagtactgaggatccgtggacgttcggtggagggaccaagctcgagatcaaaggtggtggtggttctggcggcggcggctccggtggtggtggttctcaggtgcagctgcagcagtctggggctgagctggtgaggcctgggtcctcagtgaagatttcctgcaaggcttctggctatgcattcagtagctactggatgaactgggtgaagcagaggcctggacagggtcttgagtggattggacagatttggcctggagatggtgatactaactacaatggaaagttcaagggtaaagccactctgactgcagacgaatcctccagcacagcctacatgcaactcagcagcctagcatctgaggactctgcggtctatttctgtgcaagacgggagactacgacggtaggccgttattactatgctatggactactggggccaagggaccacggtcaccgtctcctccggaggtggtggatccgaggtgcagctggtcgagtctggaggaggattggtgcagcctggagggtcattgaaactctcatgtgcagcctctggattcaccttcaataagtacgccatgaactgggtccgccaggctccaggaaagggtttggaatgggttgctcgcataagaagtaaatataataattatgcaacatattatgccgattcagtgaaagacaggttcaccatctccagagatgattcaaaaaacactgcctatctacaaatgaacaacttgaaaactgaggacactgccgtgtactactgtgtgagacatgggaacttcggtaatagctacatatcctactgggcttactggggccaagggactctggtcaccgtctcctcaggtggtggtggttctggcggcggcggctccggtggtggtggttctcagactgttgtgactcaggaaccttcactcaccgtatcacctggtggaacagtcacactcacttgtggctcctcgactggggctgttacatctggcaactacccaaactgggtccaacaaaaaccaggtcaggcaccccgtggtctaataggtgggactaagttcctcgcccccggtactcctgccagattctcaggctccctgcttggaggcaaggctgccctcaccctctcaggggtacagccagaggatgaggcagaatattactgtgttctatggtacagcaaccgctgggtgttcggtggaggaaccaaactgactgtccta

SEQ ID NO: 619 - protein, 111 aa, synthetic construct
  REGION 1..111: note = HD37-V L
DIQLTQSPASLAVSLGQRATISCKASQSVDYDGVSYLNWYQQIPGQPPKLLIYDASNLVSGIPPRFSGSGSGTDFTLNIHPVEKVDAATYHCQQSTEDPWTFGGGTKLEIK

SEQ ID NO: 620 - DNA, 333 bp, synthetic construct
  misc_feature 1..333: note = HD37-V L
  source 1..333: mol_type = other DNA
gatatccagctgacccagtctccagcttctttggctgtgtctctagggcagagggccaccatctcctgcaaggccagccaaagtgttgattatgatggtgtcagttatttgaactggtaccaacagattccaggacagccacccaaactcctcatctatgatgcatccaatctagtttctgggatcccacccaggtttagtggcagtgggtctgggacagacttcaccctcaacatccatcctgtggagaaggtggatgctgcaacctatcactgtcagcaaagtactgaggatccgtggacgttcggtggagggaccaagctcgagatcaaa

SEQ ID NO: 621 - protein, 15 aa, synthetic construct
  REGION 1..15: note = HD37-V LCDR1
KASQSVDYDGVSYLN

SEQ ID NO: 622 - protein, 7 aa, synthetic construct
  REGION 1..7: note = HD37-V LCDR2
DASNLVS

SEQ ID NO: 623 - protein, 9 aa, synthetic construct
  REGION 1..9: note = HD37-V LCDR3
QQSTEDPWT

SEQ ID NO: 624 - protein, 124 aa, synthetic construct; identical to SEQ ID NO: 476
  REGION 1..124: note = HD37-V H

SEQ ID NO: 625 - DNA, 372 bp, synthetic construct; identical to SEQ ID NO: 477
  misc_feature 1..372: note = HD37-V H
  source 1..372: mol_type = other DNA

SEQ ID NO: 626 - protein, 5 aa, synthetic construct
  REGION 1..5: note = HD37-V HCDR1
SYWMN

SEQ ID NO: 627 - protein, 17 aa, synthetic construct
  REGION 1..17: note = HD37-V HCDR2
QIWPGDGDTNYNGKFKG

SEQ ID NO: 628 - protein, 15 aa, synthetic construct
  REGION 1..15: note = HD37-V HCDR3
RETTTVGRYYYAMDY

SEQ ID NO: 629 - protein, 504 aa, synthetic construct
  REGION 1..504: note = HD37-V LH x I2C HL
DIQLTQSPASLAVSLGQRATISCKASQSVDYDGVSYLNWYQQIPGQPPKLLIYDASNLVSGIPPRFSGSGSGTDFTLNIHPVEKVDAATYHCQQSTEDPWTFGGGTKLEIKGGGGSGGGGSGGGGSQVQLQQSGAELVRPGSSVKISCKASGYAFSSYWMNWVKQRPGQGLEWIGQIWPGDGDTNYNGKFKGKATLTADESSSTAYMQLSSLASEDSAVYFCARRETTTVGRYYYAMDYWGQGTTVTVSSGGGGSEVQLVESGGGLVQPGGSLKLSCAASGFTFNKYAMNWVRQAPGKGLEWVARIRSKYNNYATYYADSVKDRFTISRDDSKNTAYLQMNNLKTEDTAVYYCVRHGNFGNSYISYWAYWGQGTLVTVSSGGGGSGGGGSGGGGSQTVVTQEPSLTVSPGGTVTLTCGSSTGAVTSGNYPNWVQQKPGQAPRGLIGGTKFLAPGTPARFSGSLLGGKAALTLSGVQPEDEAEYYCVLWYSNRWVFGGGTKLTVL

SEQ ID NO: 630 - DNA, 1512 bp, synthetic construct
  misc_feature 1..1512: note = HD37-V LH x I2C HL
  source 1..1512: mol_type = other DNA
gatatccagctgacccagtctccagcttctttggctgtgtctctagggcagagggccaccatctcctgcaaggccagccaaagtgttgattatgatggtgtcagttatttgaactggtaccaacagattccaggacagccacccaaactcctcatctatgatgcatccaatctagtttctgggatcccacccaggtttagtggcagtgggtctgggacagacttcaccctcaacatccatcctgtggagaaggtggatgctgcaacctatcactgtcagcaaagtactgaggatccgtggacgttcggtggagggaccaagctcgagatcaaaggtggtggtggttctggcggcggcggctccggtggtggtggttctcaggtgcagctgcagcagtctggggctgagctggtgaggcctgggtcctcagtgaagatttcctgcaaggcttctggctatgcattcagtagctactggatgaactgggtgaagcagaggcctggacagggtcttgagtggattggacagatttggcctggagatggtgatactaactacaatggaaagttcaagggtaaagccactctgactgcagacgaatcctccagcacagcctacatgcaactcagcagcctagcatctgaggactctgcggtctatttctgtgcaagacgggagactacgacggtaggccgttattactatgctatggactactggggccaagggaccacggtcaccgtctcctccggaggtggtggatccgaggtgcagctggtcgagtctggaggaggattggtgcagcctggagggtcattgaaactctcatgtgcagcctctggattcaccttcaataagtacgccatgaactgggtccgccaggctccaggaaagggtttggaatgggttgctcgcataagaagtaaatataataattatgcaacatattatgccgattcagtgaaagacaggttcaccatctccagagatgattcaaaaaacactgcctatctacaaatgaacaacttgaaaactgaggacactgccgtgtactactgtgtgagacatgggaacttcggtaatagctacatatcctactgggcttactggggccaagggactctggtcaccgtctcctcaggtggtggtggttctggcggcggcggctccggtggtggtggttctcagactgttgtgactcaggaaccttcactcaccgtatcacctggtggaacagtcacactcacttgtggctcctcgactggggctgttacatctggcaactacccaaactgggtccaacaaaaaccaggtcaggcaccccgtggtctaataggtgggactaagttcctcgcccccggtactcctgccagattctcaggctccctgcttggaggcaaggctgccctcaccctctcaggggtacagccagaggatgaggcagaatattactgtgttctatggtacagcaaccgctgggtgttcggtggaggaaccaaactgactgtccta

SEQ ID NO: 631 - protein, 111 aa, synthetic construct
  REGION 1..111: note = HD37-E L
DIQLTQSPASLAVSLGQRATISCKASQSVDYDGESYLNWYQQIPGQPPKLLIYDASNLVSGIPPRFSGSGSGTDFTLNIHPVEKVDAATYHCQQSTEDPWTFGGGTKLEIK

SEQ ID NO: 632 - DNA, 333 bp, synthetic construct
  misc_feature 1..333: note = HD37-E L
  source 1..333: mol_type = other DNA
gatatccagctgacccagtctccagcttctttggctgtgtctctagggcagagggccaccatctcctgcaaggccagccaaagtgttgattatgatggtgagagttatttgaactggtaccaacagattccaggacagccacccaaactcctcatctatgatgcatccaatctagtttctgggatcccacccaggtttagtggcagtgggtctgggacagacttcaccctcaacatccatcctgtggagaaggtggatgctgcaacctatcactgtcagcaaagtactgaggatccgtggacgttcggtggagggaccaagctcgagatcaaa

SEQ ID NO: 633 - protein, 15 aa, synthetic construct
  REGION 1..15: note = HD37-E LCDR1
KASQSVDYDGESYLN

SEQ ID NO: 634 - protein, 7 aa, synthetic construct
  REGION 1..7: note = HD37-E LCDR2
DASNLVS

SEQ ID NO: 635 - protein, 9 aa, synthetic construct
  REGION 1..9: note = HD37-E LCDR3
QQSTEDPWT

SEQ ID NO: 636 - protein, 124 aa, synthetic construct; identical to SEQ ID NO: 476
  REGION 1..124: note = HD37-E H

SEQ ID NO: 637 - DNA, 372 bp, synthetic construct; identical to SEQ ID NO: 477
  misc_feature 1..372: note = HD37-E H
  source 1..372: mol_type = other DNA

SEQ ID NO: 638 - protein, 5 aa, synthetic construct
  REGION 1..5: note = HD37-E HCDR1
SYWMN

SEQ ID NO: 639 - protein, 17 aa, synthetic construct
  REGION 1..17: note = HD37-E HCDR2
QIWPGDGDTNYNGKFKG

SEQ ID NO: 640 - protein, 15 aa, synthetic construct
  REGION 1..15: note = HD37-E HCDR3
RETTTVGRYYYAMDY

SEQ ID NO: 641 - protein, 504 aa, synthetic construct
  REGION 1..504: note = HD37-E LH x I2C HL
DIQLTQSPASLAVSLGQRATISCKASQSVDYDGESYLNWYQQIPGQPPKLLIYDASNLVSGIPPRFSGSGSGTDFTLNIHPVEKVDAATYHCQQSTEDPWTFGGGTKLEIKGGGGSGGGGSGGGGSQVQLQQSGAELVRPGSSVKISCKASGYAFSSYWMNWVKQRPGQGLEWIGQIWPGDGDTNYNGKFKGKATLTADESSSTAYMQLSSLASEDSAVYFCARRETTTVGRYYYAMDYWGQGTTVTVSSGGGGSEVQLVESGGGLVQPGGSLKLSCAASGFTFNKYAMNWVRQAPGKGLEWVARIRSKYNNYATYYADSVKDRFTISRDDSKNTAYLQMNNLKTEDTAVYYCVRHGNFGNSYISYWAYWGQGTLVTVSSGGGGSGGGGSGGGGSQTVVTQEPSLTVSPGGTVTLTCGSSTGAVTSGNYPNWVQQKPGQAPRGLIGGTKFLAPGTPARFSGSLLGGKAALTLSGVQPEDEAEYYCVLWYSNRWVFGGGTKLTVL

SEQ ID NO: 642 - DNA, 1512 bp, synthetic construct
  misc_feature 1..1512: note = HD37-E LH x I2C HL
  source 1..1512: mol_type = other DNA
gatatccagctgacccagtctccagcttctttggctgtgtctctagggcagagggccaccatctcctgcaaggccagccaaagtgttgattatgatggtgagagttatttgaactggtaccaacagattccaggacagccacccaaactcctcatctatgatgcatccaatctagtttctgggatcccacccaggtttagtggcagtgggtctgggacagacttcaccctcaacatccatcctgtggagaaggtggatgctgcaacctatcactgtcagcaaagtactgaggatccgtggacgttcggtggagggaccaagctcgagatcaaaggtggtggtggttctggcggcggcggctccggtggtggtggttctcaggtgcagctgcagcagtctggggctgagctggtgaggcctgggtcctcagtgaagatttcctgcaaggcttctggctatgcattcagtagctactggatgaactgggtgaagcagaggcctggacagggtcttgagtggattggacagatttggcctggagatggtgatactaactacaatggaaagttcaagggtaaagccactctgactgcagacgaatcctccagcacagcctacatgcaactcagcagcctagcatctgaggactctgcggtctatttctgtgcaagacgggagactacgacggtaggccgttattactatgctatggactactggggccaagggaccacggtcaccgtctcctccggaggtggtggatccgaggtgcagctggtcgagtctggaggaggattggtgcagcctggagggtcattgaaactctcatgtgcagcctctggattcaccttcaataagtacgccatgaactgggtccgccaggctccaggaaagggtttggaatgggttgctcgcataagaagtaaatataataattatgcaacatattatgccgattcagtgaaagacaggttcaccatctccagagatgattcaaaaaacactgcctatctacaaatgaacaacttgaaaactgaggacactgccgtgtactactgtgtgagacatgggaacttcggtaatagctacatatcctactgggcttactggggccaagggactctggtcaccgtctcctcaggtggtggtggttctggcggcggcggctccggtggtggtggttctcagactgttgtgactcaggaaccttcactcaccgtatcacctggtggaacagtcacactcacttgtggctcctcgactggggctgttacatctggcaactacccaaactgggtccaacaaaaaccaggtcaggcaccccgtggtctaataggtgggactaagttcctcgcccccggtactcctgccagattctcaggctccctgcttggaggcaaggctgccctcaccctctcaggggtacagccagaggatgaggcagaatattactgtgttctatggtacagcaaccgctgggtgttcggtggaggaaccaaactgactgtccta

SEQ ID NO: 643 - protein, 111 aa, synthetic construct
  REGION 1..111: note = HD37-Q L
DIQLTQSPASLAVSLGQRATISCKASQSVDYDGQSYLNWYQQIPGQPPKLLIYDASNLVSGIPPRFSGSGSGTDFTLNIHPVEKVDAATYHCQQSTEDPWTFGGGTKLEIK

SEQ ID NO: 644 - DNA, 333 bp, synthetic construct
  misc_feature 1..333: note = HD37-Q L
  source 1..333: mol_type = other DNA
gatatccagctgacccagtctccagcttctttggctgtgtctctagggcagagggccaccatctcctgcaaggccagccaaagtgttgattatgatggtcagagttatttgaactggtaccaacagattccaggacagccacccaaactcctcatctatgatgcatccaatctagtttctgggatcccacccaggtttagtggcagtgggtctgggacagacttcaccctcaacatccatcctgtggagaaggtggatgctgcaacctatcactgtcagcaaagtactgaggatccgtggacgttcggtggagggaccaagctcgagatcaaa

SEQ ID NO: 645 - protein, 15 aa, synthetic construct
  REGION 1..15: note = HD37-Q LCDR1
KASQSVDYDGQSYLN

SEQ ID NO: 646 - protein, 7 aa, synthetic construct
  REGION 1..7: note = HD37-Q LCDR2
DASNLVS

SEQ ID NO: 647 - protein, 9 aa, synthetic construct
  REGION 1..9: note = HD37-Q LCDR3
QQSTEDPWT

SEQ ID NO: 648 - protein, 124 aa, synthetic construct; identical to SEQ ID NO: 476
  REGION 1..124: note = HD37-Q H

SEQ ID NO: 649 - DNA, 372 bp, synthetic construct; identical to SEQ ID NO: 477
  misc_feature 1..372: note = HD37-Q H
  source 1..372: mol_type = other DNA

SEQ ID NO: 650 - protein, 5 aa, synthetic construct
  REGION 1..5: note = HD37-Q HCDR1
SYWMN

SEQ ID NO: 651 - protein, 17 aa, synthetic construct
  REGION 1..17: note = HD37-Q HCDR2
QIWPGDGDTNYNGKFKG

SEQ ID NO: 652 - protein, 15 aa, synthetic construct
  REGION 1..15: note = HD37-Q HCDR3
RETTTVGRYYYAMDY

SEQ ID NO: 653 - protein, 504 aa, synthetic construct
  REGION 1..504: note = HD37-Q LH x I2C HL
DIQLTQSPASLAVSLGQRATISCKASQSVDYDGQSYLNWYQQIPGQPPKLLIYDASNLVSGIPPRFSGSGSGTDFTLNIHPVEKVDAATYHCQQSTEDPWTFGGGTKLEIKGGGGSGGGGSGGGGSQVQLQQSGAELVRPGSSVKISCKASGYAFSSYWMNWVKQRPGQGLEWIGQIWPGDGDTNYNGKFKGKATLTADESSSTAYMQLSSLASEDSAVYFCARRETTTVGRYYYAMDYWGQGTTVTVSSGGGGSEVQLVESGGGLVQPGGSLKLSCAASGFTFNKYAMNWVRQAPGKGLEWVARIRSKYNNYATYYADSVKDRFTISRDDSKNTAYLQMNNLKTEDTAVYYCVRHGNFGNSYISYWAYWGQGTLVTVSSGGGGSGGGGSGGGGSQTVVTQEPSLTVSPGGTVTLTCGSSTGAVTSGNYPNWVQQKPGQAPRGLIGGTKFLAPGTPARFSGSLLGGKAALTLSGVQPEDEAEYYCVLWYSNRWVFGGGTKLTVL

SEQ ID NO: 654 - DNA, 1512 bp, synthetic construct
  misc_feature 1..1512: note = HD37-Q LH x I2C HL
  source 1..1512: mol_type = other DNA
gatatccagctgacccagtctccagcttctttggctgtgtctctagggcagagggccaccatctcctgcaaggccagccaaagtgttgattatgatggtcagagttatttgaactggtaccaacagattccaggacagccacccaaactcctcatctatgatgcatccaatctagtttctgggatcccacccaggtttagtggcagtgggtctgggacagacttcaccctcaacatccatcctgtggagaaggtggatgctgcaacctatcactgtcagcaaagtactgaggatccgtggacgttcggtggagggaccaagctcgagatcaaaggtggtggtggttctggcggcggcggctccggtggtggtggttctcaggtgcagctgcagcagtctggggctgagctggtgaggcctgggtcctcagtgaagatttcctgcaaggcttctggctatgcattcagtagctactggatgaactgggtgaagcagaggcctggacagggtcttgagtggattggacagatttggcctggagatggtgatactaactacaatggaaagttcaagggtaaagccactctgactgcagacgaatcctccagcacagcctacatgcaactcagcagcctagcatctgaggactctgcggtctatttctgtgcaagacgggagactacgacggtaggccgttattactatgctatggactactggggccaagggaccacggtcaccgtctcctccggaggtggtggatccgaggtgcagctggtcgagtctggaggaggattggtgcagcctggagggtcattgaaactctcatgtgcagcctctggattcaccttcaataagtacgccatgaactgggtccgccaggctccaggaaagggtttggaatgggttgctcgcataagaagtaaatataataattatgcaacatattatgccgattcagtgaaagacaggttcaccatctccagagatgattcaaaaaacactgcctatctacaaatgaacaacttgaaaactgaggacactgccgtgtactactgtgtgagacatgggaacttcggtaatagctacatatcctactgggcttactggggccaagggactctggtcaccgtctcctcaggtggtggtggttctggcggcggcggctccggtggtggtggttctcagactgttgtgactcaggaaccttcactcaccgtatcacctggtggaacagtcacactcacttgtggctcctcgactggggctgttacatctggcaactacccaaactgggtccaacaaaaaccaggtcaggcaccccgtggtctaataggtgggactaagttcctcgcccccggtactcctgccagattctcaggctccctgcttggaggcaaggctgccctcaccctctcaggggtacagccagaggatgaggcagaatattactgtgttctatggtacagcaaccgctgggtgttcggtggaggaaccaaactgactgtccta

SEQ ID NO: 655 - protein, 111 aa, synthetic construct
  REGION 1..111: note = HD37-N L
DIQLTQSPASLAVSLGQRATISCKASQSVDYDGNSYLNWYQQIPGQPPKLLIYDASNLVSGIPPRFSGSGSGTDFTLNIHPVEKVDAATYHCQQSTEDPWTFGGGTKLEIK

SEQ ID NO: 656 - DNA, 333 bp, synthetic construct
  misc_feature 1..333: note = HD37-N L
  source 1..333: mol_type = other DNA
gatatccagctgacccagtctccagcttctttggctgtgtctctagggcagagggccaccatctcctgcaaggccagccaaagtgttgattatgatggtaacagttatttgaactggtaccaacagattccaggacagccacccaaactcctcatctatgatgcatccaatctagtttctgggatcccacccaggtttagtggcagtgggtctgggacagacttcaccctcaacatccatcctgtggagaaggtggatgctgcaacctatcactgtcagcaaagtactgaggatccgtggacgttcggtggagggaccaagctcgagatcaaa

SEQ ID NO: 657 - protein, 15 aa, synthetic construct
  REGION 1..15: note = HD37-N LCDR1
KASQSVDYDGNSYLN

SEQ ID NO: 658 - protein, 7 aa, synthetic construct
  REGION 1..7: note = HD37-N LCDR2
DASNLVS

SEQ ID NO: 659 - protein, 9 aa, synthetic construct
  REGION 1..9: note = HD37-N LCDR3
QQSTEDPWT

SEQ ID NO: 660 - protein, 124 aa, synthetic construct; identical to SEQ ID NO: 476
  REGION 1..124: note = HD37-N H

SEQ ID NO: 661 - DNA, 372 bp, synthetic construct; identical to SEQ ID NO: 477
  misc_feature 1..372: note = HD37-N H
  source 1..372: mol_type = other DNA

SEQ ID NO: 662 - protein, 5 aa, synthetic construct
  REGION 1..5: note = HD37-N HCDR1
SYWMN

SEQ ID NO: 663 - protein, 17 aa, synthetic construct
  REGION 1..17: note = HD37-N HCDR2
QIWPGDGDTNYNGKFKG

SEQ ID NO: 664 - protein, 15 aa, synthetic construct
  REGION 1..15: note = HD37-N HCDR3
RETTTVGRYYYAMDY

SEQ ID NO: 665 - protein, 504 aa, synthetic construct
  REGION 1..504: note = HD37-N LH x I2C HL
DIQLTQSPASLAVSLGQRATISCKASQSVDYDGNSYLNWYQQIPGQPPKLLIYDASNLVSGIPPRFSGSGSGTDFTLNIHPVEKVDAATYHCQQSTEDPWTFGGGTKLEIKGGGGSGGGGSGGGGSQVQLQQSGAELVRPGSSVKISCKASGYAFSSYWMNWVKQRPGQGLEWIGQIWPGDGDTNYNGKFKGKATLTADESSSTAYMQLSSLASEDSAVYFCARRETTTVGRYYYAMDYWGQGTTVTVSSGGGGSEVQLVESGGGLVQPGGSLKLSCAASGFTFNKYAMNWVRQAPGKGLEWVARIRSKYNNYATYYADSVKDRFTISRDDSKNTAYLQMNNLKTEDTAVYYCVRHGNFGNSYISYWAYWGQGTLVTVSSGGGGSGGGGSGGGGSQTVVTQEPSLTVSPGGTVTLTCGSSTGAVTSGNYPNWVQQKPGQAPRGLIGGTKFLAPGTPARFSGSLLGGKAALTLSGVQPEDEAEYYCVLWYSNRWVFGGGTKLTVL

SEQ ID NO: 666 - DNA, 1512 bp, synthetic construct
  misc_feature 1..1512: note = HD37-N LH x I2C HL
  source 1..1512: mol_type = other DNA
gatatccagctgacccagtctccagcttctttggctgtgtctctagggcagagggccaccatctcctgcaaggccagccaaagtgttgattatgatggtaacagttatttgaactggtaccaacagattccaggacagccacccaaactcctcatctatgatgcatccaatctagtttctgggatcccacccaggtttagtggcagtgggtctgggacagacttcaccctcaacatccatcctgtggagaaggtggatgctgcaacctatcactgtcagcaaagtactgaggatccgtggacgttcggtggagggaccaagctcgagatcaaaggtggtggtggttctggcggcggcggctccggtggtggtggttctcaggtgcagctgcagcagtctggggctgagctggtgaggcctgggtcctcagtgaagatttcctgcaaggcttctggctatgcattcagtagctactggatgaactgggtgaagcagaggcctggacagggtcttgagtggattggacagatttggcctggagatggtgatactaactacaatggaaagttcaagggtaaagccactctgactgcagacgaatcctccagcacagcctacatgcaactcagcagcctagcatctgaggactctgcggtctatttctgtgcaagacgggagactacgacggtaggccgttattactatgctatggactactggggccaagggaccacggtcaccgtctcctccggaggtggtggatccgaggtgcagctggtcgagtctggaggaggattggtgcagcctggagggtcattgaaactctcatgtgcagcctctggattcaccttcaataagtacgccatgaactgggtccgccaggctccaggaaagggtttggaatgggttgctcgcataagaagtaaatataataattatgcaacatattatgccgattcagtgaaagacaggttcaccatctccagagatgattcaaaaaacactgcctatctacaaatgaacaacttgaaaactgaggacactgccgtgtactactgtgtgagacatgggaacttcggtaatagctacatatcctactgggcttactggggccaagggactctggtcaccgtctcctcaggtggtggtggttctggcggcggcggctccggtggtggtggttctcagactgttgtgactcaggaaccttcactcaccgtatcacctggtggaacagtcacactcacttgtggctcctcgactggggctgttacatctggcaactacccaaactgggtccaacaaaaaccaggtcaggcaccccgtggtctaataggtgggactaagttcctcgcccccggtactcctgccagattctcaggctccctgcttggaggcaaggctgccctcaccctctcaggggtacagccagaggatgaggcagaatattactgtgttctatggtacagcaaccgctgggtgttcggtggaggaaccaaactgactgtccta

SEQ ID NO: 667 - protein, 111 aa, synthetic construct
  REGION 1..111: note = HD37-K L
DIQLTQSPASLAVSLGQRATISCKASQSVDYDGKSYLNWYQQIPGQPPKLLIYDASNLVSGIPPRFSGSGSGTDFTLNIHPVEKVDAATYHCQQSTEDPWTFGGGTKLEIK

SEQ ID NO: 668 - DNA, 333 bp, synthetic construct
  misc_feature 1..333: note = HD37-K L
  source 1..333: mol_type = other DNA
gatatccagctgacccagtctccagcttctttggctgtgtctctagggcagagggccaccatctcctgcaaggccagccaaagtgttgattatgatggtaagagttatttgaactggtaccaacagattccaggacagccacccaaactcctcatctatgatgcatccaatctagtttctgggatcccacccaggtttagtggcagtgggtctgggacagacttcaccctcaacatccatcctgtggagaaggtggatgctgcaacctatcactgtcagcaaagtactgaggatccgtggacgttcggtggagggaccaagctcgagatcaaa

SEQ ID NO: 669 - protein, 15 aa, synthetic construct
  REGION 1..15: note = HD37-K LCDR1
KASQSVDYDGKSYLN

SEQ ID NO: 670 - protein, 7 aa, synthetic construct
  REGION 1..7: note = HD37-K LCDR2
DASNLVS

SEQ ID NO: 671 - protein, 9 aa, synthetic construct
  REGION 1..9: note = HD37-K LCDR3
QQSTEDPWT

SEQ ID NO: 672 - protein, 124 aa, synthetic construct; identical to SEQ ID NO: 476
  REGION 1..124: note = HD37-K H

SEQ ID NO: 673 - DNA, 372 bp, synthetic construct; identical to SEQ ID NO: 477
  misc_feature 1..372: note = HD37-K H
  source 1..372: mol_type = other DNA

SEQ ID NO: 674 - protein, 5 aa, synthetic construct
  REGION 1..5: note = HD37-K HCDR1
SYWMN

SEQ ID NO: 675 - protein, 17 aa, synthetic construct
  REGION 1..17: note = HD37-K HCDR2
QIWPGDGDTNYNGKFKG

SEQ ID NO: 676 - protein, 15 aa, synthetic construct
  REGION 1..15: note = HD37-K HCDR3
RETTTVGRYYYAMDY

SEQ ID NO: 677 - protein, 504 aa, synthetic construct
  REGION 1..504: note = HD37-K LH x I2C HL
DIQLTQSPASLAVSLGQRATISCKASQSVDYDGKSYLNWYQQIPGQPPKLLIYDASNLVSGIPPRFSGSGSGTDFTLNIHPVEKVDAATYHCQQSTEDPWTFGGGTKLEIKGGGGSGGGGSGGGGSQVQLQQSGAELVRPGSSVKISCKASGYAFSSYWMNWVKQRPGQGLEWIGQIWPGDGDTNYNGKFKGKATLTADESSSTAYMQLSSLASEDSAVYFCARRETTTVGRYYYAMDYWGQGTTVTVSSGGGGSEVQLVESGGGLVQPGGSLKLSCAASGFTFNKYAMNWVRQAPGKGLEWVARIRSKYNNYATYYADSVKDRFTISRDDSKNTAYLQMNNLKTEDTAVYYCVRHGNFGNSYISYWAYWGQGTLVTVSSGGGGSGGGGSGGGGSQTVVTQEPSLTVSPGGTVTLTCGSSTGAVTSGNYPNWVQQKPGQAPRGLIGGTKFLAPGTPARFSGSLLGGKAALTLSGVQPEDEAEYYCVLWYSNRWVFGGGTKLTVL

SEQ ID NO: 678 - DNA, 1512 bp, synthetic construct
  misc_feature 1..1512: note = HD37-K LH x I2C HL
  source 1..1512: mol_type = other DNA
gatatccagctgacccagtctccagcttctttggctgtgtctctagggcagagggccaccatctcctgcaaggccagccaaagtgttgattatgatggtaagagttatttgaactggtaccaacagattccaggacagccacccaaactcctcatctatgatgcatccaatctagtttctgggatcccacccaggtttagtggcagtgggtctgggacagacttcaccctcaacatccatcctgtggagaaggtggatgctgcaacctatcactgtcagcaaagtactgaggatccgtggacgttcggtggagggaccaagctcgagatcaaaggtggtggtggttctggcggcggcggctccggtggtggtggttctcaggtgcagctgcagcagtctggggctgagctggtgaggcctgggtcctcagtgaagatttcctgcaaggcttctggctatgcattcagtagctactggatgaactgggtgaagcagaggcctggacagggtcttgagtggattggacagatttggcctggagatggtgatactaactacaatggaaagttcaagggtaaagccactctgactgcagacgaatcctccagcacagcctacatgcaactcagcagcctagcatctgaggactctgcggtctatttctgtgcaagacgggagactacgacggtaggccgttattactatgctatggactactggggccaagggaccacggtcaccgtctcctccggaggtggtggatccgaggtgcagctggtcgagtctggaggaggattggtgcagcctggagggtcattgaaactctcatgtgcagcctctggattcaccttcaataagtacgccatgaactgggtccgccaggctccaggaaagggtttggaatgggttgctcgcataagaagtaaatataataattatgcaacatattatgccgattcagtgaaagacaggttcaccatctccagagatgattcaaaaaacactgcctatctacaaatgaacaacttgaaaactgaggacactgccgtgtactactgtgtgagacatgggaacttcggtaatagctacatatcctactgggcttactggggccaagggactctggtcaccgtctcctcaggtggtggtggttctggcggcggcggctccggtggtggtggttctcagactgttgtgactcaggaaccttcactcaccgtatcacctggtggaacagtcacactcacttgtggctcctcgactggggctgttacatctggcaactacccaaactgggtccaacaaaaaccaggtcaggcaccccgtggtctaataggtgggactaagttcctcgcccccggtactcctgccagattctcaggctccctgcttggaggcaaggctgccctcaccctctcaggggtacagccagaggatgaggcagaatattactgtgttctatggtacagcaaccgctgggtgttcggtggaggaaccaaactgactgtccta

SEQ ID NO: 679 - protein, 111 aa, synthetic construct
  REGION 1..111: note = HD37-R L
DIQLTQSPASLAVSLGQRATISCKASQSVDYDGRSYLNWYQQIPGQPPKLLIYDASNLVSGIPPRFSGSGSGTDFTLNIHPVEKVDAATYHCQQSTEDPWTFGGGTKLEIK

SEQ ID NO: 680 - DNA, 333 bp, synthetic construct
  misc_feature 1..333: note = HD37-R L
  source 1..333: mol_type = other DNA
gatatccagctgacccagtctccagcttctttggctgtgtctctagggcagagggccaccatctcctgcaaggccagccaaagtgttgattatgatggtcgtagttatttgaactggtaccaacagattccaggacagccacccaaactcctcatctatgatgcatccaatctagtttctgggatcccacccaggtttagtggcagtgggtctgggacagacttcaccctcaacatccatcctgtggagaaggtggatgctgcaacctatcactgtcagcaaagtactgaggatccgtggacgttcggtggagggaccaagctcgagatcaaa

SEQ ID NO: 681 - protein, 15 aa, synthetic construct
  REGION 1..15: note = HD37-R LCDR1
KASQSVDYDGRSYLN

SEQ ID NO: 682 - protein, 7 aa, synthetic construct
  REGION 1..7: note = HD37-R LCDR2
DASNLVS

SEQ ID NO: 683 - protein, 9 aa, synthetic construct
  REGION 1..9: note = HD37-R LCDR3
QQSTEDPWT

SEQ ID NO: 684 - protein, 124 aa, synthetic construct; identical to SEQ ID NO: 476
  REGION 1..124: note = HD37-R H

SEQ ID NO: 685 - DNA, 372 bp, synthetic construct; identical to SEQ ID NO: 477
  misc_feature 1..372: note = HD37-R H
  source 1..372: mol_type = other DNA

SEQ ID NO: 686 - protein, 5 aa, synthetic construct
  REGION 1..5: note = HD37-R HCDR1
SYWMN

SEQ ID NO: 687 - protein, 17 aa, synthetic construct
  REGION 1..17: note = HD37-R HCDR2
QIWPGDGDTNYNGKFKG

SEQ ID NO: 688 - protein, 15 aa, synthetic construct
  REGION 1..15: note = HD37-R HCDR3
RETTTVGRYYYAMDY

SEQ ID NO: 689 - protein, 504 aa, synthetic construct
  REGION 1..504: note = HD37-R LH x I2C HL
DIQLTQSPASLAVSLGQRATISCKASQSVDYDGRSYLNWYQQIPGQPPKLLIYDASNLVSGIPPRFSGSGSGTDFTLNIHPVEKVDAATYHCQQSTEDPWTFGGGTKLEIKGGGGSGGGGSGGGGSQVQLQQSGAELVRPGSSVKISCKASGYAFSSYWMNWVKQRPGQGLEWIGQIWPGDGDTNYNGKFKGKATLTADESSSTAYMQLSSLASEDSAVYFCARRETTTVGRYYYAMDYWGQGTTVTVSSGGGGSEVQLVESGGGLVQPGGSLKLSCAASGFTFNKYAMNWVRQAPGKGLEWVARIRSKYNNYATYYADSVKDRFTISRDDSKNTAYLQMNNLKTEDTAVYYCVRHGNFGNSYISYWAYWGQGTLVTVSSGGGGSGGGGSGGGGSQTVVTQEPSLTVSPGGTVTLTCGSSTGAVTSGNYPNWVQQKPGQAPRGLIGGTKFLAPGTPARFSGSLLGGKAALTLSGVQPEDEAEYYCVLWYSNRWVFGGGTKLTVL

SEQ ID NO: 690 - DNA, 1512 bp, synthetic construct
  misc_feature 1..1512: note = HD37-R LH x I2C HL
  source 1..1512: mol_type = other DNA
gatatccagctgacccagtctccagcttctttggctgtgtctctagggcagagggccaccatctcctgcaaggccagccaaagtgttgattatgatggtcgtagttatttgaactggtaccaacagattccaggacagccacccaaactcctcatctatgatgcatccaatctagtttctgggatcccacccaggtttagtggcagtgggtctgggacagacttcaccctcaacatccatcctgtggagaaggtggatgctgcaacctatcactgtcagcaaagtactgaggatccgtggacgttcggtggagggaccaagctcgagatcaaaggtggtggtggttctggcggcggcggctccggtggtggtggttctcaggtgcagctgcagcagtctggggctgagctggtgaggcctgggtcctcagtgaagatttcctgcaaggcttctggctatgcattcagtagctactggatgaactgggtgaagcagaggcctggacagggtcttgagtggattggacagatttggcctggagatggtgatactaactacaatggaaagttcaagggtaaagccactctgactgcagacgaatcctccagcacagcctacatgcaactcagcagcctagcatctgaggactctgcggtctatttctgtgcaagacgggagactacgacggtaggccgttattactatgctatggactactggggccaagggaccacggtcaccgtctcctccggaggtggtggatccgaggtgcagctggtcgagtctggaggaggattggtgcagcctggagggtcattgaaactctcatgtgcagcctctggattcaccttcaataagtacgccatgaactgggtccgccaggctccaggaaagggtttggaatgggttgctcgcataagaagtaaatataataattatgcaacatattatgccgattcagtgaaagacaggttcaccatctccagagatgattcaaaaaacactgcctatctacaaatgaacaacttgaaaactgaggacactgccgtgtactactgtgtgagacatgggaacttcggtaatagctacatatcctactgggcttactggggccaagggactctggtcaccgtctcctcaggtggtggtggttctggcggcggcggctccggtggtggtggttctcagactgttgtgactcaggaaccttcactcaccgtatcacctggtggaacagtcacactcacttgtggctcctcgactggggctgttacatctggcaactacccaaactgggtccaacaaaaaccaggtcaggcaccccgtggtctaataggtgggactaagttcctcgcccccggtactcctgccagattctcaggctccctgcttggaggcaaggctgccctcaccctctcaggggtacagccagaggatgaggcagaatattactgtgttctatggtacagcaaccgctgggtgttcggtggaggaaccaaactgactgtccta

SEQ ID NO: 691 - protein, 111 aa, synthetic construct
  REGION 1..111: note = HD37-H L
DIQLTQSPASLAVSLGQRATISCKASQSVDYDGHSYLNWYQQIPGQPPKLLIYDASNLVSGIPPRFSGSGSGTDFTLNIHPVEKVDAATYHCQQSTEDPWTFGGGTKLEIK

SEQ ID NO: 692 - DNA, 333 bp, synthetic construct
  misc_feature 1..333: note = HD37-H L
  source 1..333: mol_type = other DNA
gatatccagctgacccagtctccagcttctttggctgtgtctctagggcagagggccaccatctcctgcaaggccagccaaagtgttgattatgatggtcacagttatttgaactggtaccaacagattccaggacagccacccaaactcctcatctatgatgcatccaatctagtttctgggatcccacccaggtttagtggcagtgggtctgggacagacttcaccctcaacatccatcctgtggagaaggtggatgctgcaacctatcactgtcagcaaagtactgaggatccgtggacgttcggtggagggaccaagctcgagatcaaa

SEQ ID NO: 693 - protein, 15 aa, synthetic construct
  REGION 1..15: note = HD37-H LCDR1
KASQSVDYDGHSYLN

SEQ ID NO: 694 - protein, 7 aa, synthetic construct
  REGION 1..7: note = HD37-H LCDR2
DASNLVS

SEQ ID NO: 695 - protein, 9 aa, synthetic construct
  REGION 1..9: note = HD37-H LCDR3
QQSTEDPWT

SEQ ID NO: 696 - protein, 124 aa, synthetic construct; identical to SEQ ID NO: 476
  REGION 1..124: note = HD37-H H

SEQ ID NO: 697 - DNA, 372 bp, synthetic construct; identical to SEQ ID NO: 477
  misc_feature 1..372: note = HD37-H H
  source 1..372: mol_type = other DNA

SEQ ID NO: 698 - protein, 5 aa, synthetic construct
  REGION 1..5: note = HD37-H HCDR1
SYWMN

SEQ ID NO: 699 - protein, 17 aa, synthetic construct
  REGION 1..17: note = HD37-H HCDR2
QIWPGDGDTNYNGKFKG

SEQ ID NO: 700 - protein, 15 aa, synthetic construct
  REGION 1..15: note = HD37-H HCDR3
RETTTVGRYYYAMDY

SEQ ID NO: 701 - protein, 504 aa, synthetic construct
  REGION 1..504: note = HD37-H LH x I2C HL
DIQLTQSPASLAVSLGQRATISCKASQSVDYDGHSYLNWYQQIPGQPPKLLIYDASNLVSGIPPRFSGSGSGTDFTLNIHPVEKVDAATYHCQQSTEDPWTFGGGTKLEIKGGGGSGGGGSGGGGSQVQLQQSGAELVRPGSSVKISCKASGYAFSSYWMNWVKQRPGQGLEWIGQIWPGDGDTNYNGKFKGKATLTADESSSTAYMQLSSLASEDSAVYFCARRETTTVGRYYYAMDYWGQGTTVTVSSGGGGSEVQLVESGGGLVQPGGSLKLSCAASGFTFNKYAMNWVRQAPGKGLEWVARIRSKYNNYATYYADSVKDRFTISRDDSKNTAYLQMNNLKTEDTAVYYCVRHGNFGNSYISYWAYWGQGTLVTVSSGGGGSGGGGSGGGGSQTVVTQEPSLTVSPGGTVTLTCGSSTGAVTSGNYPNWVQQKPGQAPRGLIGGTKFLAPGTPARFSGSLLGGKAALTLSGVQPEDEAEYYCVLWYSNRWVFGGGTKLTVL

SEQ ID NO: 702 - DNA, 1512 bp, synthetic construct
  misc_feature 1..1512: note = HD37-H LH x I2C HL
  source 1..1512: mol_type = other DNA
gatatccagctgacccagtctccagcttctttggctgtgtctctagggcagagggccaccatctcctgcaaggccagccaaagtgttgattatgatggtcacagttatttgaactggtaccaacagattccaggacagccacccaaactcctcatctatgatgcatccaatctagtttctgggatcccacccaggtttagtggcagtgggtctgggacagacttcaccctcaacatccatcctgtggagaaggtggatgctgcaacctatcactgtcagcaaagtactgaggatccgtggacgttcggtggagggaccaagctcgagatcaaaggtggtggtggttctggcggcggcggctccggtggtggtggttctcaggtgcagctgcagcagtctggggctgagctggtgaggcctgggtcctcagtgaagatttcctgcaaggcttctggctatgcattcagtagctactggatgaactgggtgaagcagaggcctggacagggtcttgagtggattggacagatttggcctggagatggtgatactaactacaatggaaagttcaagggtaaagccactctgactgcagacgaatcctccagcacagcctacatgcaactcagcagcctagcatctgaggactctgcggtctatttctgtgcaagacgggagactacgacggtaggccgttattactatgctatggactactggggccaagggaccacggtcaccgtctcctccggaggtggtggatccgaggtgcagctggtcgagtctggaggaggattggtgcagcctggagggtcattgaaactctcatgtgcagcctctggattcaccttcaataagtacgccatgaactgggtccgccaggctccaggaaagggtttggaatgggttgctcgcataagaagtaaatataataattatgcaacatattatgccgattcagtgaaagacaggttcaccatctccagagatgattcaaaaaacactgcctatctacaaatgaacaacttgaaaactgaggacactgccgtgtactactgtgtgagacatgggaacttcggtaatagctacatatcctactgggcttactggggccaagggactctggtcaccgtctcctcaggtggtggtggttctggcggcggcggctccggtggtggtggttctcagactgttgtgactcaggaaccttcactcaccgtatcacctggtggaacagtcacactcacttgtggctcctcgactggggctgttacatctggcaactacccaaactgggtccaacaaaaaccaggtcaggcaccccgtggtctaataggtgggactaagttcctcgcccccggtactcctgccagattctcaggctccctgcttggaggcaaggctgccctcaccctctcaggggtacagccagaggatgaggcagaatattactgtgttctatggtacagcaaccgctgggtgttcggtggaggaaccaaactgactgtccta

SEQ ID NO: 703 - protein, 111 aa, synthetic construct
  REGION 1..111: note = HD37-Y L
DIQLTQSPASLAVSLGQRATISCKASQSVDYDGYSYLNWYQQIPGQPPKLLIYDASNLVSGIPPRFSGSGSGTDFTLNIHPVEKVDAATYHCQQSTEDPWTFGGGTKLEIK

SEQ ID NO: 704 - DNA, 333 bp, synthetic construct
  misc_feature 1..333: note = HD37-Y L
  source 1..333: mol_type = other DNA
gatatccagctgacccagtctccagcttctttggctgtgtctctagggcagagggccaccatctcctgcaaggccagccaaagtgttgattatgatggttacagttatttgaactggtaccaacagattccaggacagccacccaaactcctcatctatgatgcatccaatctagtttctgggatcccacccaggtttagtggcagtgggtctgggacagacttcaccctcaacatccatcctgtggagaaggtggatgctgcaacctatcactgtcagcaaagtactgaggatccgtggacgttcggtggagggaccaagctcgagatcaaa

SEQ ID NO: 705 - protein, 15 aa, synthetic construct
  REGION 1..15: note = HD37-Y LCDR1
KASQSVDYDGYSYLN

SEQ ID NO: 706 - protein, 7 aa, synthetic construct
  REGION 1..7: note = HD37-Y LCDR2
DASNLVS

SEQ ID NO: 707 - protein, 9 aa, synthetic construct
  REGION 1..9: note = HD37-Y LCDR3
QQSTEDPWT

SEQ ID NO: 708 - protein, 124 aa, synthetic construct; identical to SEQ ID NO: 476
  REGION 1..124: note = HD37-Y H

SEQ ID NO: 709 - DNA, 372 bp, synthetic construct; identical to SEQ ID NO: 477
  misc_feature 1..372: note = HD37-Y H
  source 1..372: mol_type = other DNA

SEQ ID NO: 710 - protein, 5 aa, synthetic construct
  REGION 1..5: note = HD37-Y HCDR1
SYWMN

SEQ ID NO: 711 - protein, 17 aa, synthetic construct
  REGION 1..17: note = HD37-Y HCDR2
QIWPGDGDTNYNGKFKG

SEQ ID NO: 712 - protein, 15 aa, synthetic construct
  REGION 1..15: note = HD37-Y HCDR3
RETTTVGRYYYAMDY

SEQ ID NO: 713 - protein, 504 aa, synthetic construct
  REGION 1..504: note = HD37-Y LH x I2C HL
DIQLTQSPASLAVSLGQRATISCKASQSVDYDGYSYLNWYQQIPGQPPKLLIYDASNLVSGIPPRFSGSGSGTDFTLNIHPVEKVDAATYHCQQSTEDPWTFGGGTKLEIKGGGGSGGGGSGGGGSQVQLQQSGAELVRPGSSVKISCKASGYAFSSYWMNWVKQRPGQGLEWIGQIWPGDGDTNYNGKFKGKATLTADESSSTAYMQLSSLASEDSAVYFCARRETTTVGRYYYAMDYWGQGTTVTVSSGGGGSEVQLVESGGGLVQPGGSLKLSCAASGFTFNKYAMNWVRQAPGKGLEWVARIRSKYNNYATYYADSVKDRFTISRDDSKNTAYLQMNNLKTEDTAVYYCVRHGNFGNSYISYWAYWGQGTLVTVSSGGGGSGGGGSGGGGSQTVVTQEPSLTVSPGGTVTLTCGSSTGAVTSGNYPNWVQQKPGQAPRGLIGGTKFLAPGTPARFSGSLLGGKAALTLSGVQPEDEAEYYCVLWYSNRWVFGGGTKLTVL

SEQ ID NO: 714 - DNA, 1512 bp, synthetic construct
  misc_feature 1..1512: note = HD37-Y LH x I2C HL
  source 1..1512: mol_type = other DNA
gatatccagctgacccagtctccagcttctttggctgtgtctctagggcagagggccaccatctcctgcaaggccagccaaagtgttgattatgatggttacagttatttgaactggtaccaacagattccaggacagccacccaaactcctcatctatgatgcatccaatctagtttctgggatcccacccaggtttagtggcagtgggtctgggacagacttcaccctcaacatccatcctgtggagaaggtggatgctgcaacctatcactgtcagcaaagtactgaggatccgtggacgttcggtggagggaccaagctcgagatcaaaggtggtggtggttctggcggcggcggctccggtggtggtggttctcaggtgcagctgcagcagtctggggctgagctggtgaggcctgggtcctcagtgaagatttcctgcaaggcttctggctatgcattcagtagctactggatgaactgggtgaagcagaggcctggacagggtcttgagtggattggacagatttggcctggagatggtgatactaactacaatggaaagttcaagggtaaagccactctgactgcagacgaatcctccagcacagcctacatgcaactcagcagcctagcatctgaggactctgcggtctatttctgtgcaagacgggagactacgacggtaggccgttattactatgctatggactactggggccaagggaccacggtcaccgtctcctccggaggtggtggatccgaggtgcagctggtcgagtctggaggaggattggtgcagcctggagggtcattgaaactctcatgtgcagcctctggattcaccttcaataagtacgccatgaactgggtccgccaggctccaggaaagggtttggaatgggttgctcgcataagaagtaaatataataattatgcaacatattatgccgattcagtgaaagacaggttcaccatctccagagatgattcaaaaaacactgcctatctacaaatgaacaacttgaaaactgaggacactgccgtgtactactgtgtgagacatgggaacttcggtaatagctacatatcctactgggcttactggggccaagggactctggtcaccgtctcctcaggtggtggtggttctggcggcggcggctccggtggtggtggttctcagactgttgtgactcaggaaccttcactcaccgtatcacctggtggaacagtcacactcacttgtggctcctcgactggggctgttacatctggcaactacccaaactgggtccaacaaaaaccaggtcaggcaccccgtggtctaataggtgggactaagttcctcgcccccggtactcctgccagattctcaggctccctgcttggaggcaaggctgccctcaccctctcaggggtacagccagaggatgaggcagaatattactgtgttctatggtacagcaaccgctgggtgttcggtggaggaaccaaactgactgtccta

SEQ ID NO: 715 - protein, 111 aa, synthetic construct
  REGION 1..111: note = HD37-P L
DIQLTQSPASLAVSLGQRATISCKASQSVDYDGPSYLNWYQQIPGQPPKLLIYDASNLVSGIPPRFSGSGSGTDFTLNIHPVEKVDAATYHCQQSTEDPWTFGGGTKLEIK

SEQ ID NO: 716 - DNA, 333 bp, synthetic construct
  misc_feature 1..333: note = HD37-P L
  source 1..333: mol_type = other DNA
gatatccagctgacccagtctccagcttctttggctgtgtctctagggcagagggccaccatctcctgcaaggccagccaaagtgttgattatgatggtccaagttatttgaactggtaccaacagattccaggacagccacccaaactcctcatctatgatgcatccaatctagtttctgggatcccacccaggtttagtggcagtgggtctgggacagacttcaccctcaacatccatcctgtggagaaggtggatgctgcaacctatcactgtcagcaaagtactgaggatccgtggacgttcggtggagggaccaagctcgagatcaaa

SEQ ID NO: 717 - protein, 15 aa, synthetic construct
  REGION 1..15: note = HD37-P LCDR1
KASQSVDYDGPSYLN

SEQ ID NO: 718 - protein, 7 aa, synthetic construct
  REGION 1..7: note = HD37-P LCDR2
DASNLVS

SEQ ID NO: 719 - protein, 9 aa, synthetic construct
  REGION 1..9: note = HD37-P LCDR3
QQSTEDPWT

SEQ ID NO: 720 - protein, 124 aa, synthetic construct; identical to SEQ ID NO: 476
  REGION 1..124: note = HD37-P H

SEQ ID NO: 721 - DNA, 372 bp, synthetic construct; identical to SEQ ID NO: 477
  misc_feature 1..372: note = HD37-P H
  source 1..372: mol_type = other DNA

SEQ ID NO: 722 - protein, 5 aa, synthetic construct
  REGION 1..5: note = HD37-P HCDR1
SYWMN

SEQ ID NO: 723 - protein, 17 aa, synthetic construct
  REGION 1..17: note = HD37-P HCDR2
QIWPGDGDTNYNGKFKG

SEQ ID NO: 724 - protein, 15 aa, synthetic construct
  REGION 1..15: note = HD37-P HCDR3
RETTTVGRYYYAMDY

SEQ ID NO: 725 - protein, 504 aa, synthetic construct
  REGION 1..504: note = HD37-P LH x I2C HL
DIQLTQSPASLAVSLGQRATISCKASQSVDYDGPSYLNWYQQIPGQPPKLLIYDASNLVSGIPPRFSGSGSGTDFTLNIHPVEKVDAATYHCQQSTEDPWTFGGGTKLEIKGGGGSGGGGSGGGGSQVQLQQSGAELVRPGSSVKISCKASGYAFSSYWMNWVKQRPGQGLEWIGQIWPGDGDTNYNGKFKGKATLTADESSSTAYMQLSSLASEDSAVYFCARRETTTVGRYYYAMDYWGQGTTVTVSSGGGGSEVQLVESGGGLVQPGGSLKLSCAASGFTFNKYAMNWVRQAPGKGLEWVARIRSKYNNYATYYADSVKDRFTISRDDSKNTAYLQMNNLKTEDTAVYYCVRHGNFGNSYISYWAYWGQGTLVTVSSGGGGSGGGGSGGGGSQTVVTQEPSLTVSPGGTVTLTCGSSTGAVTSGNYPNWVQQKPGQAPRGLIGGTKFLAPGTPARFSGSLLGGKAALTLSGVQPEDEAEYYCVLWYSNRWVFGGGTKLTVL

SEQ ID NO: 726 - DNA, 1512 bp, synthetic construct
  misc_feature 1..1512: note = HD37-P LH x I2C HL
  source 1..1512: mol_type = other DNA
gatatccagctgacccagtctccagcttctttggctgtgtctctagggcagagggccaccatctcctgcaaggccagccaaagtgttgattatgatggtccaagttatttgaactggtaccaacagattccaggacagccacccaaactcctcatctatgatgcatccaatctagtttctgggatcccacccaggtttagtggcagtgggtctgggacagacttcaccctcaacatccatcctgtggagaaggtggatgctgcaacctatcactgtcagcaaagtactgaggatccgtggacgttcggtggagggaccaagctcgagatcaaaggtggtggtggttctggcggcggcggctccggtggtggtggttctcaggtgcagctgcagcagtctggggctgagctggtgaggcctgggtcctcagtgaagatttcctgcaaggcttctggctatgcattcagtagctactggatgaactgggtgaagcagaggcctggacagggtcttgagtggattggacagatttggcctggagatggtgatactaactacaatggaaagttcaagggtaaagccactctgactgcagacgaatcctccagcacagcctacatgcaactcagcagcctagcatctgaggactctgcggtctatttctgtgcaagacgggagactacgacggtaggccgttattactatgctatggactactggggccaagggaccacggtcaccgtctcctccggaggtggtggatccgaggtgcagctggtcgagtctggaggaggattggtgcagcctggagggtcattgaaactctcatgtgcagcctctggattcaccttcaataagtacgccatgaactgggtccgccaggctccaggaaagggtttggaatgggttgctcgcataagaagtaaatataataattatgcaacatattatgccgattcagtgaaagacaggttcaccatctccagagatgattcaaaaaacactgcctatctacaaatgaacaacttgaaaactgaggacactgccgtgtactactgtgtgagacatgggaacttcggtaatagctacatatcctactgggcttactggggccaagggactctggtcaccgtctcctcaggtggtggtggttctggcggcggcggctccggtggtggtggttctcagactgttgtgactcaggaaccttcactcaccgtatcacctggtggaacagtcacactcacttgtggctcctcgactggggctgttacatctggcaactacccaaactgggtccaacaaaaaccaggtcaggcaccccgtggtctaataggtgggactaagttcctcgcccccggtactcctgccagattctcaggctccctgcttggaggcaaggctgccctcaccctctcaggggtacagccagaggatgaggcagaatattactgtgttctatggtacagcaaccgctgggtgttcggtggaggaaccaaactgactgtccta

SEQ ID NO: 727 - protein, 111 aa, synthetic construct
  REGION 1..111: note = HD37-F L
DIQLTQSPASLAVSLGQRATISCKASQSVDYDGFSYLNWYQQIPGQPPKLLIYDASNLVSGIPPRFSGSGSGTDFTLNIHPVEKVDAATYHCQQSTEDPWTFGGGTKLEIK

SEQ ID NO: 728 - DNA, 333 bp, synthetic construct
  misc_feature 1..333: note = HD37-F L
  source 1..333: mol_type = other DNA
gatatccagctgacccagtctccagcttctttggctgtgtctctagggcagagggccaccatctcctgcaaggccagccaaagtgttgattatgatggtttcagttatttgaactggtaccaacagattccaggacagccacccaaactcctcatctatgatgcatccaatctagtttctgggatcccacccaggtttagtggcagtgggtctgggacagacttcaccctcaacatccatcctgtggagaaggtggatgctgcaacctatcactgtcagcaaagtactgaggatccgtggacgttcggtggagggaccaagctcgagatcaaa

SEQ ID NO: 729 - protein, 15 aa, synthetic construct
  REGION 1..15: note = HD37-F LCDR1
KASQSVDYDGFSYLN

SEQ ID NO: 730 - protein, 7 aa, synthetic construct
  REGION 1..7: note = HD37-F LCDR2
DASNLVS

SEQ ID NO: 731 - protein, 9 aa, synthetic construct
  REGION 1..9: note = HD37-F LCDR3
QQSTEDPWT

SEQ ID NO: 732 - protein, 124 aa, synthetic construct; identical to SEQ ID NO: 476
  REGION 1..124: note = HD37-F H

SEQ ID NO: 733 - DNA, 372 bp, synthetic construct; identical to SEQ ID NO: 477
  misc_feature 1..372: note = HD37-F H
  source 1..372: mol_type = other DNA

SEQ ID NO: 734 - protein, 5 aa, synthetic construct
  REGION 1..5: note = HD37-F HCDR1
SYWMN

SEQ ID NO: 735 - protein, 17 aa, synthetic construct
  REGION 1..17: note = HD37-F HCDR2
QIWPGDGDTNYNGKFKG

SEQ ID NO: 736 - protein, 15 aa, synthetic construct
  REGION 1..15: note = HD37-F HCDR3
RETTTVGRYYYAMDY

SEQ ID NO: 737 - protein, 504 aa, synthetic construct
  REGION 1..504: note = HD37-F LH x I2C HL
DIQLTQSPASLAVSLGQRATISCKASQSVDYDGFSYLNWYQQIPGQPPKLLIYDASNLVSGIPPRFSGSGSGTDFTLNIHPVEKVDAATYHCQQSTEDPWTFGGGTKLEIKGGGGSGGGGSGGGGSQVQLQQSGAELVRPGSSVKISCKASGYAFSSYWMNWVKQRPGQGLEWIGQIWPGDGDTNYNGKFKGKATLTADESSSTAYMQLSSLASEDSAVYFCARRETTTVGRYYYAMDYWGQGTTVTVSSGGGGSEVQLVESGGGLVQPGGSLKLSCAASGFTFNKYAMNWVRQAPGKGLEWVARIRSKYNNYATYYADSVKDRFTISRDDSKNTAYLQMNNLKTEDTAVYYCVRHGNFGNSYISYWAYWGQGTLVTVSSGGGGSGGGGSGGGGSQTVVTQEPSLTVSPGGTVTLTCGSSTGAVTSGNYPNWVQQKPGQAPRGLIGGTKFLAPGTPARFSGSLLGGKAALTLSGVQPEDEAEYYCVLWYSNRWVFGGGTKLTVL

SEQ ID NO: 738 - DNA, 1512 bp, synthetic construct
  misc_feature 1..1512: note = HD37-F LH x I2C HL
  source 1..1512: mol_type = other DNA
gatatccagctgacccagtctccagcttctttggctgtgtctctagggcagagggccaccatctcctgcaaggccagccaaagtgttgattatgatggtttcagttatttgaactggtaccaacagattccaggacagccacccaaactcctcatctatgatgcatccaatctagtttctgggatcccacccaggtttagtggcagtgggtctgggacagacttcaccctcaacatccatcctgtggagaaggtggatgctgcaacctatcactgtcagcaaagtactgaggatccgtggacgttcggtggagggaccaagctcgagatcaaaggtggtggtggttctggcggcggcggctccggtggtggtggttctcaggtgcagctgcagcagtctggggctgagctggtgaggcctgggtcctcagtgaagatttcctgcaaggcttctggctatgcattcagtagctactggatgaactgggtgaagcagaggcctggacagggtcttgagtggattggacagatttggcctggagatggtgatactaactacaatggaaagttcaagggtaaagccactctgactgcagacgaatcctccagcacagcctacatgcaactcagcagcctagcatctgaggactctgcggtctatttctgtgcaagacgggagactacgacggtaggccgttattactatgctatggactactggggccaagggaccacggtcaccgtctcctccggaggtggtggatccgaggtgcagctggtcgagtctggaggaggattggtgcagcctggagggtcattgaaactctcatgtgcagcctctggattcaccttcaataagtacgccatgaactgggtccgccaggctccaggaaagggtttggaatgggttgctcgcataagaagtaaatataataattatgcaacatattatgccgattcagtgaaagacaggttcaccatctccagagatgattcaaaaaacactgcctatctacaaatgaacaacttgaaaactgaggacactgccgtgtactactgtgtgagacatgggaacttcggtaatagctacatatcctactgggcttactggggccaagggactctggtcaccgtctcctcaggtggtggtggttctggcggcggcggctccggtggtggtggttctcagactgttgtgactcaggaaccttcactcaccgtatcacctggtggaacagtcacactcacttgtggctcctcgactggggctgttacatctggcaactacccaaactgggtccaacaaaaaccaggtcaggcaccccgtggtctaataggtgggactaagttcctcgcccccggtactcctgccagattctcaggctccctgcttggaggcaaggctgccctcaccctctcaggggtacagccagaggatgaggcagaatattactgtgttctatggtacagcaaccgctgggtgttcggtggaggaaccaaactgactgtccta

SEQ ID NO: 739 - protein, 111 aa, synthetic construct
  REGION 1..111: note = HD37-W L
DIQLTQSPASLAVSLGQRATISCKASQSVDYDGWSYLNWYQQIPGQPPKLLIYDASNLVSGIPPRFSGSGSGTDFTLNIHPVEKVDAATYHCQQSTEDPWTFGGGTKLEIK

SEQ ID NO: 740 - DNA, 333 bp, synthetic construct
  misc_feature 1..333: note = HD37-W L
  source 1..333: mol_type = other DNA
gatatccagctgacccagtctccagcttctttggctgtgtctctagggcagagggccaccatctcctgcaaggccagccaaagtgttgattatgatggttggagttatttgaactggtaccaacagattccaggacagccacccaaactcctcatctatgatgcatccaatctagtttctgggatcccacccaggtttagtggcagtgggtctgggacagacttcaccctcaacatccatcctgtggagaaggtggatgctgcaacctatcactgtcagcaaagtactgaggatccgtggacgttcggtggagggaccaagctcgagatcaaa

SEQ ID NO: 741 - protein, 15 aa, synthetic construct
  REGION 1..15: note = HD37-W LCDR1
KASQSVDYDGWSYLN

SEQ ID NO: 742 - protein, 7 aa, synthetic construct
  REGION 1..7: note = HD37-W LCDR2
DASNLVS

SEQ ID NO: 743 - protein, 9 aa, synthetic construct
  REGION 1..9: note = HD37-W LCDR3
QQSTEDPWT

SEQ ID NO: 744 - protein, 124 aa, synthetic construct; identical to SEQ ID NO: 476
  REGION 1..124: note = HD37-W H

SEQ ID NO: 745 - DNA, 372 bp, synthetic construct; identical to SEQ ID NO: 477
  misc_feature 1..372: note = HD37-W H
  source 1..372: mol_type = other DNA

SEQ ID NO: 746 - protein, 5 aa, synthetic construct
  REGION 1..5: note = HD37-W HCDR1
SYWMN

SEQ ID NO: 747 - protein, 17 aa, synthetic construct
  REGION 1..17: note = HD37-W HCDR2
QIWPGDGDTNYNGKFKG

SEQ ID NO: 748 - protein, 15 aa, synthetic construct
  REGION 1..15: note = HD37-W HCDR3
RETTTVGRYYYAMDY

SEQ ID NO: 749 - protein, 504 aa, synthetic construct
  REGION 1..504: note = HD37-W LH x I2C HL
DIQLTQSPASLAVSLGQRATISCKASQSVDYDGWSYLNWYQQIPGQPPKLLIYDASNLVSGIPPRFSGSGSGTDFTLNIHPVEKVDAATYHCQQSTEDPWTFGGGTKLEIKGGGGSGGGGSGGGGSQVQLQQSGAELVRPGSSVKISCKASGYAFSSYWMNWVKQRPGQGLEWIGQIWPGDGDTNYNGKFKGKATLTADESSSTAYMQLSSLASEDSAVYFCARRETTTVGRYYYAMDYWGQGTTVTVSSGGGGSEVQLVESGGGLVQPGGSLKLSCAASGFTFNKYAMNWVRQAPGKGLEWVARIRSKYNNYATYYADSVKDRFTISRDDSKNTAYLQMNNLKTEDTAVYYCVRHGNFGNSYISYWAYWGQGTLVTVSSGGGGSGGGGSGGGGSQTVVTQEPSLTVSPGGTVTLTCGSSTGAVTSGNYPNWVQQKPGQAPRGLIGGTKFLAPGTPARFSGSLLGGKAALTLSGVQPEDEAEYYCVLWYSNRWVFGGGTKLTVL

SEQ ID NO: 750 - DNA, 1512 bp, synthetic construct
  misc_feature 1..1512: note = HD37-W LH x I2C HL
  source 1..1512: mol_type = other DNA
gatatccagctgacccagtctccagcttctttggctgtgtctctagggcagagggccaccatctcctgcaaggccagccaaagtgttgattatgatggttggagttatttgaactggtaccaacagattccaggacagccacccaaactcctcatctatgatgcatccaatctagtttctgggatcccacccaggtttagtggcagtgggtctgggacagacttcaccctcaacatccatcctgtggagaaggtggatgctgcaacctatcactgtcagcaaagtactgaggatccgtggacgttcggtggagggaccaagctcgagatcaaaggtggtggtggttctggcggcggcggctccggtggtggtggttctcaggtgcagctgcagcagtctggggctgagctggtgaggcctgggtcctcagtgaagatttcctgcaaggcttctggctatgcattcagtagctactggatgaactgggtgaagcagaggcctggacagggtcttgagtggattggacagatttggcctggagatggtgatactaactacaatggaaagttcaagggtaaagccactctgactgcagacgaatcctccagcacagcctacatgcaactcagcagcctagcatctgaggactctgcggtctatttctgtgcaagacgggagactacgacggtaggccgttattactatgctatggactactggggccaagggaccacggtcaccgtctcctccggaggtggtggatccgaggtgcagctggtcgagtctggaggaggattggtgcagcctggagggtcattgaaactctcatgtgcagcctctggattcaccttcaataagtacgccatgaactgggtccgccaggctccaggaaagggtttggaatgggttgctcgcataagaagtaaatataataattatgcaacatattatgccgattcagtgaaagacaggttcaccatctccagagatgattcaaaaaacactgcctatctacaaatgaacaacttgaaaactgaggacactgccgtgtactactgtgtgagacatgggaacttcggtaatagctacatatcctactgggcttactggggccaagggactctggtcaccgtctcctcaggtggtggtggttctggcggcggcggctccggtggtggtggttctcagactgttgtgactcaggaaccttcactcaccgtatcacctggtggaacagtcacactcacttgtggctcctcgactggggctgttacatctggcaactacccaaactgggtccaacaaaaaccaggtcaggcaccccgtggtctaataggtgggactaagttcctcgcccccggtactcctgccagattctcaggctccctgcttggaggcaaggctgccctcaccctctcaggggtacagccagaggatgaggcagaatattactgtgttctatggtacagcaaccgctgggtgttcggtggaggaaccaaactgactgtccta

SEQ ID NO: 751 - protein, 111 aa, synthetic construct
  REGION 1..111: note = HD37-M L
DIQLTQSPASLAVSLGQRATISCKASQSVDYDGMSYLNWYQQIPGQPPKLLIYDASNLVSGIPPRFSGSGSGTDFTLNIHPVEKVDAATYHCQQSTEDPWTFGGGTKLEIK

SEQ ID NO: 752 - DNA, 333 bp, synthetic construct
  misc_feature 1..333: note = HD37-M L
  source 1..333: mol_type = other DNA
gatatccagctgacccagtctccagcttctttggctgtgtctctagggcagagggccaccatctcctgcaaggccagccaaagtgttgattatgatggtatgagttatttgaactggtaccaacagattccaggacagccacccaaactcctcatctatgatgcatccaatctagtttctgggatcccacccaggtttagtggcagtgggtctgggacagacttcaccctcaacatccatcctgtggagaaggtggatgctgcaacctatcactgtcagcaaagtactgaggatccgtggacgttcggtggagggaccaagctcgagatcaaa

SEQ ID NO: 753 - protein, 15 aa, synthetic construct
  REGION 1..15: note = HD37-M LCDR1
KASQSVDYDGMSYLN

SEQ ID NO: 754 - protein, 7 aa, synthetic construct
  REGION 1..7: note = HD37-M LCDR2
DASNLVS

SEQ ID NO: 755 - protein, 9 aa, synthetic construct
  REGION 1..9: note = HD37-M LCDR3
QQSTEDPWT

SEQ ID NO: 756 - protein, 124 aa, synthetic construct; identical to SEQ ID NO: 476
  REGION 1..124: note = HD37-M H

SEQ ID NO: 757 - DNA, 372 bp, synthetic construct; identical to SEQ ID NO: 477
  misc_feature 1..372: note = HD37-M H
  source 1..372: mol_type = other DNA

SEQ ID NO: 758 - protein, 5 aa, synthetic construct
  REGION 1..5: note = HD37-M HCDR1
SYWMN

SEQ ID NO: 759 - protein, 17 aa, synthetic construct
  REGION 1..17: note = HD37-M HCDR2
QIWPGDGDTNYNGKFKG

SEQ ID NO: 760 - protein, 15 aa, synthetic construct
  REGION 1..15: note = HD37-M HCDR3
RETTTVGRYYYAMDY

SEQ ID NO: 761 - protein, 504 aa, synthetic construct
  REGION 1..504: note = HD37-M LH x I2C HL
DIQLTQSPASLAVSLGQRATISCKASQSVDYDGMSYLNWYQQIPGQPPKLLIYDASNLVSGIPPRFSGSGSGTDFTLNIHPVEKVDAATYHCQQSTEDPWTFGGGTKLEIKGGGGSGGGGSGGGGSQVQLQQSGAELVRPGSSVKISCKASGYAFSSYWMNWVKQRPGQGLEWIGQIWPGDGDTNYNGKFKGKATLTADESSSTAYMQLSSLASEDSAVYFCARRETTTVGRYYYAMDYWGQGTTVTVSSGGGGSEVQLVESGGGLVQPGGSLKLSCAASGFTFNKYAMNWVRQAPGKGLEWVARIRSKYNNYATYYADSVKDRFTISRDDSKNTAYLQMNNLKTEDTAVYYCVRHGNFGNSYISYWAYWGQGTLVTVSSGGGGSGGGGSGGGGSQTVVTQEPSLTVSPGGTVTLTCGSSTGAVTSGNYPNWVQQKPGQAPRGLIGGTKFLAPGTPARFSGSLLGGKAALTLSGVQPEDEAEYYCVLWYSNRWVFGGGTKLTVL

SEQ ID NO: 762 - DNA, 1512 bp, synthetic construct
  misc_feature 1..1512: note = HD37-M LH x I2C HL
  source 1..1512: mol_type = other DNA
gatatccagctgacccagtctccagcttctttggctgtgtctctagggcagagggccaccatctcctgcaaggccagccaaagtgttgattatgatggtatgagttatttgaactggtaccaacagattccaggacagccacccaaactcctcatctatgatgcatccaatctagtttctgggatcccacccaggtttagtggcagtgggtctgggacagacttcaccctcaacatccatcctgtggagaaggtggatgctgcaacctatcactgtcagcaaagtactgaggatccgtggacgttcggtggagggaccaagctcgagatcaaaggtggtggtggttctggcggcggcggctccggtggtggtggttctcaggtgcagctgcagcagtctggggctgagctggtgaggcctgggtcctcagtgaagatttcctgcaaggcttctggctatgcattcagtagctactggatgaactgggtgaagcagaggcctggacagggtcttgagtggattggacagatttggcctggagatggtgatactaactacaatggaaagttcaagggtaaagccactctgactgcagacgaatcctccagcacagcctacatgcaactcagcagcctagcatctgaggactctgcggtctatttctgtgcaagacgggagactacgacggtaggccgttattactatgctatggactactggggccaagggaccacggtcaccgtctcctccggaggtggtggatccgaggtgcagctggtcgagtctggaggaggattggtgcagcctggagggtcattgaaactctcatgtgcagcctctggattcaccttcaataagtacgccatgaactgggtccgccaggctccaggaaagggtttggaatgggttgctcgcataagaagtaaatataataattatgcaacatattatgccgattcagtgaaagacaggttcaccatctccagagatgattcaaaaaacactgcctatctacaaatgaacaacttgaaaactgaggacactgccgtgtactactgtgtgagacatgggaacttcggtaatagctacatatcctactgggcttactggggccaagggactctggtcaccgtctcctcaggtggtggtggttctggcggcggcggctccggtggtggtggttctcagactgttgtgactcaggaaccttcactcaccgtatcacctggtggaacagtcacactcacttgtggctcctcgactggggctgttacatctggcaactacccaaactgggtccaacaaaaaccaggtcaggcaccccgtggtctaataggtgggactaagttcctcgcccccggtactcctgccagattctcaggctccctgcttggaggcaaggctgccctcaccctctcaggggtacagccagaggatgaggcagaatattactgtgttctatggtacagcaaccgctgggtgttcggtggaggaaccaaactgactgtccta

SEQ ID NO: 763 - DNA, 72 bp, synthetic construct
  misc_feature 1..72: note = 37VH-aXho1
  source 1..72: mol_type = other DNA
cagctgctcgagtctggggctgagstgrwgargcctgggkcctcagtgaagrtttcctgcaaggcttctggc

SEQ ID NO: 764 - DNA, 81 bp, synthetic construct
  misc_feature 1..81: note = 37VH-b
  source 1..81: mol_type = other DNA
ccactcaagaccctgtccagggssctgcytcacccagttcatccagtagctagwgaatgyatagccagaagccttgcagga

SEQ ID NO: 765 - DNA, 72 bp, synthetic construct
  misc_feature 1..72: note = 37VH-c
  source 1..72: mol_type = other DNA
ggacagggtcttgagtggatkggacagatttggcctggagatggtgatactaactacaatggaaagttcaag

SEQ ID NO: 766 - DNA, 82 bp, synthetic construct
  misc_feature 1..82: note = 37VH-d
  source 1..82: mol_type = other DNA
caggctgctgagttscatgtagrctgtgctggtggatkygtcassagtcakagtgrctytacccttgaactttccattgtag

SEQ ID NO: 767 - DNA, 71 bp, synthetic construct
  misc_feature 1..71: note = 37VH-e
  source 1..71: mol_type = other DNA
catgsaactcagcagcctgssatctgaggacactgcggtctattwctgtgcaagacgggagactacgacgg

SEQ ID NO: 768 - DNA, 81 bp, synthetic construct
  misc_feature 1..81: note = 37VH-fBstE2
  source 1..81: mol_type = other DNA
ggagacggtgaccgtggtcccttggccccagtagtccatagcatagtaataacggcctaccgtcgtagtctcccgtcttgc

SEQ ID NO: 769 - DNA, 84 bp, synthetic construct
  misc_feature 1..84: note = 37VL-A-SacI
  source 1..84: mol_type = other DNA
cagctggagctccagatgacccagtctccakcttctttgkctgygtctstagggsasagagycaccatcwcctgcaaggccagc

SEQ ID NO: 770 - DNA, 69 bp, synthetic construct
  misc_feature 1..69: note = 37VL-B
  misc_feature 26..27: note = n is a, c, g, or t
  source 1..69: mol_type = other DNA
ctgttggtaccagttcaaataastsnnaccatcataatcaacactttggctggccttgcaggtgatggt

SEQ ID NO: 771 - DNA, 72 bp, synthetic construct
  misc_feature 1..72: note = 37VL-C
  source 1..72: mol_type = other DNA
ttgaactggtaccaacagawaccaggamagscacccaaactcctcatctatgatgcatccaatctagtttct

SEQ ID NO: 772 - DNA, 69 bp, synthetic construct
  misc_feature 1..69: note = 37VL-D
  source 1..69: mol_type = other DNA
gagggtgaagtctgtcccagacccactgccactaaacctggrtgggaycccagaaactagattggatgc

SEQ ID NO: 773 - DNA, 78 bp, synthetic construct
  misc_feature 1..78: note = 37VL-E
  source 1..78: mol_type = other DNA
gggacagacttcaccctcamcatcmrtyctstgsagmmggwggatkycgcaacctatyactgtcagcaaagtactgag

SEQ ID NO: 774 - DNA, 79 bp, synthetic construct
  misc_feature 1..79: note = 37VL-F-BsiW1Spe1
  source 1..79: mol_type = other DNA
actcagactagtcgtacgtttgatctccaccttggtcccttgaccgaacgtccacggatcctcagtactttgctgacag

SEQ ID NO: 775 - protein, 8 aa, synthetic construct
  REGION 1..8: note = Flag-tag
DYKDDDDK

SEQ ID NO: 776 - DNA, 4173 bp, synthetic construct
  misc_feature 1..4173: note = human cMET construct
  source 1..4173: mol_type = other DNA
atgaaggcccccgctgtgcttgcacctggcatcctcgtgctcctgtttaccttggtgcagaggagcaatggggagtgtaaagaggcactagcaaagtccgagatgaatgtgaatatgaagtatcagcttcccaacttcaccgcggaaacacccatccagaatgtcattctacatgagcatcacattttccttggtgccactaactacatttatgttttaaatgaggaagaccttcagaaggttgctgagtacaagactgggcctgtgctggaacacccagattgtttcccatgtcaggactgcagcagcaaagccaatttatcaggaggtgtttggaaagataacatcaacatggctctagttgtggacacctactatgatgatcaactcattagctgtggcagcgtcaacagagggacctgccagcgacatgtctttccccacaatcatactgctgacatacagtcggaggttcactgcatattctccccacagatagaagagcccagccagtgtcctgactgtgtggtgagcgccctgggagccaaagtcctttcatctgtaaaggaccggttcatcaacttctttgtaggcaataccataaattcttcttatttcccagatcatccattgcattcgatatcagtgagaaggctaaaggaaacgaaagatggttttatgtttttgacggaccagtcctacattgatgttttacctgagttcagagattcttaccccattaagtatgtccatgcctttgaaagcaacaattttatttacttcttgacggtccaaagggaaactctagatgctcagacttttcacacaagaataatcaggttctgttccataaactctggattgcattcctacatggaaatgcctctggagtgtattctcacagaaaagagaaaaaagagatccacaaagaaggaagtgtttaatatacttcaggctgcgtatgtcagcaagcctggggcccagcttgctagacaaataggagccagcctgaatgatgacattcttttcggggtgttcgcacaaagcaagccagattctgccgaaccaatggatcgatctgccatgtgtgcattccctatcaaatatgtcaacgacttcttcaacaagatcgtcaacaaaaacaatgtgagatgtctccagcatttttacggacccaatcatgagcactgctttaataggacacttctgagaaattcatcaggctgtgaagcgcgccgtgatgaatatcgaacagagtttaccacagctttgcagcgcgttgacttattcatgggtcaattcagcgaagtcctcttaacatctatatccaccttcattaaaggagacctcaccatagctaatcttgggacatcagagggtcgcttcatgcaggttgtggtttctcgatcaggaccatcaacccctcatgtgaattttctcctggactcccatccagtgtctccagaagtgattgtggagcatacattaaaccaaaatggctacacactggttatcactgggaagaagatcacgaagatcccattgaatggcttgggctgcagacatttccagtcctgcagtcaatgcctctctgccccaccctttgttcagtgtggctggtgccacgacaaatgtgtgcgatcggaggaatgcctgagcgggacatggactcaacagatctgtctgcctgcaatctacaaggttttcccaaatagtgcaccccttgaaggagggacaaggctgaccatatgtggctgggactttggatttcggaggaataataaatttgatttaaagaaaactagagttctccttggaaatgagagctgcaccttgactttaagtgagagcacgatgaatacattgaaatgcacagttggtcctgccatgaataagcatttcaatatgtccataattatttcaaatggccacgggacaacacaatacagtacattctcctatgtggatcctgtaataacaagtatttcgccgaaatacggtcctatggctggtggcactttacttactttaactggaaattacctaaacagtgggaatagcagacacatttcaattggtggaaaaacatgtactttaaaaagtgtgtcaaacagtattcttgaatgttataccccagcccaaaccatttcaactgagtttgctgttaaattgaaaattgacttagccaaccgagagacaagcatcttcagttaccgtgaagatcccattgtctatgaaattcatccaaccaaatcttttattagtggtgggagcacaataacaggtgttgggaaaaacctgaactcagttagtgtcccgagaatggtcataaatgtgcatgaagcaggaaggaactttacagtggcatgtcaacatcgctctaattcagagataatctgttgtaccactccttccctgcaacagctgaatctgcaactccccctgaaaaccaaagcctttttcatgttagatgggatcctttccaaatactttgatctcatttatgtacataatcctgtgtttaagccttttgaaaagccagtgatgatctcaatgggcaatgaaaatgtactggaaattaagggaaatgatattgaccctgaagcagttaaaggtgaagtgttaaaagttggaaataagagctgtgagaatatacacttacattctgaagccgttttatgcacggtccccaatgacctgctgaaattgaacagcgagctaaatatagagtggaagcaagcaatttcttcaaccgtccttggaaaagtaatagttcaaccagatcagaatttcacaggattgattgctggtgttgtctcaatatcaacagcactgttattactacttgggtttttcctgtggctgaaaaagagaaagcaaattaaagatctgggcagtgaattagttcgctacgatgcaagagtacacactcctcatttggataggcttgtaagtgcccgaagtgtaagcccaactacagaaatggtttcaaatgaatctgtagactaccgagctacttttccagaagatcagtttcctaattcatctcagaacggttcatgccgacaagtgcagtatcctctgacagacatgtcccccatcctaactagtggggactctgatatatccagtccattactgcaaaatactgtccacattgacctcagtgctctaaatccagagctggtccaggcagtgcagcatgtagtgattgggcccagtagcctgattgtgcatttcaatgaagtcataggaagagggcattttggttgtgtatatcatgggactttgttggacaatgatggcaagaaaattcactgtgctgtgaaatccttgaacagaatcactgacataggagaagtttcccaatttctgaccgagggaatcatcatgaaagattttagtcatcccaatgtcctctcgctcctgggaatctgcctgcgaagtgaagggtctccgctggtggtcctaccatacatgaaacatggagatcttcgaaatttcattcgaaatgagactcataatccaactgtaaaagatcttattggctttggtcttcaagtagccaaaggcatgaaatatcttgcaagcaaaaagtttgtccacagagacttggctgcaagaaactgtatgctggatgaaaaattcacagtcaaggttgctgattttggtcttgccagagacatgtatgataaagaatactatagtgtacacaacaaaacaggtgcaaagctgccagtgaagtggatggctttggaaagtctgcaaactcaaaagtttaccaccaagtcagatgtgtggtcctttggcgtgctcctctgggagctgatgacaagaggagccccaccttatcctgacgtaaacacctttgatataactgtttacttgttgcaagggagaagactcctacaacccgaatactgcccagaccccttatatgaagtaatgctaaaatgctggcaccctaaagccgaaatgcgcccatccttttctgaactggtgtcccggatatcagcgatcttctctactttcattggggagcactatgtccatgtgaacgctacttatgtgaacgtaaaatgtgtcgctccgtatccttctctgttgtcatcagaagataacgctgatgatgaggtggacacacgaccagcctccttctgggagacatcatag

SEQ ID NO: 777 - protein, 1390 aa, synthetic construct
  REGION 1..1390: note = human cMET construct
MKAPAVLAPGILVLLFTLVQRSNGECKEALAKSEMNVNMKYQLPNFTAETPIQNVILHEHHIFLGATNYIYVLNEEDLQKVAEYKTGPVLEHPDCFPCQDCSSKANLSGGVWKDNINMALVVDTYYDDQLISCGSVNRGTCQRHVFPHNHTADIQSEVHCIFSPQIEEPSQCPDCVVSALGAKVLSSVKDRFINFFVGNTINSSYFPDHPLHSISVRRLKETKDGFMFLTDQSYIDVLPEFRDSYPIKYVHAFESNNFIYFLTVQRETLDAQTFHTRIIRFCSINSGLHSYMEMPLECILTEKRKKRSTKKEVFNILQAAYVSKPGAQLARQIGASLNDDILFGVFAQSKPDSAEPMDRSAMCAFPIKYVNDFFNKIVNKNNVRCLQHFYGPNHEHCFNRTLLRNSSGCEARRDEYRTEFTTALQRVDLFMGQFSEVLLTSISTFIKGDLTIANLGTSEGRFMQVVVSRSGPSTPHVNFLLDSHPVSPEVIVEHTLNQNGYTLVITGKKITKIPLNGLGCRHFQSCSQCLSAPPFVQCGWCHDKCVRSEECLSGTWTQQICLPAIYKVFPNSAPLEGGTRLTICGWDFGFRRNNKFDLKKTRVLLGNESCTLTLSESTMNTLKCTVGPAMNKHFNMSIIISNGHGTTQYSTFSYVDPVITSISPKYGPMAGGTLLTLTGNYLNSGNSRHISIGGKTCTLKSVSNSILECYTPAQTISTEFAVKLKIDLANRETSIFSYREDPIVYEIHPTKSFISGGSTITGVGKNLNSVSVPRMVINVHEAGRNFTVACQHRSNSEIICCTTPSLQQLNLQLPLKTKAFFMLDGILSKYFDLIYVHNPVFKPFEKPVMISMGNENVLEIKGNDIDPEAVKGEVLKVGNKSCENIHLHSEAVLCTVPNDLLKLNSELNIEWKQAISSTVLGKVIVQPDQNFTGLIAGVVSISTALLLLLGFFLWLKKRKQIKDLGSELVRYDARVHTPHLDRLVSARSVSPTTEMVSNESVDYRATFPEDQFPNSSQNGSCRQVQYPLTDMSPILTSGDSDISSPLLQNTVHIDLSALNPELVQAVQHVVIGPSSLIVHFNEVIGRGHFGCVYHGTLLDNDGKKIHCAVKSLNRITDIGEVSQFLTEGIIMKDFSHPNVLSLLGICLRSEGSPLVVLPYMKHGDLRNFIRNETHNPTVKDLIGFGLQVAKGMKYLASKKFVHRDLAARNCMLDEKFTVKVADFGLARDMYDKEYYSVHNKTGAKLPVKWMALESLQTQKFTTKSDVWSFGVLLWELMTRGAPPYPDVNTFDITVYLLQGRRLLQPEYCPDPLYEVMLKCWHPKAEMRPSFSELVSRISAIFSTFIGEHYVHVNATYVNVKCVAPYPSLLSSEDNADDEVDTRPASFWETS

SEQ ID NO: 778 - DNA, 37 bp, synthetic construct
  misc_feature 1..37: note = forward primer
  source 1..37: mol_type = other DNA
aggaattcaccatgaaggcccccgctgtgcttgcacc

SEQ ID NO: 779 - DNA, 23 bp, synthetic construct
  misc_feature 1..23: note = reverse primer
  source 1..23: mol_type = other DNA
ctccagaggcatttccatgtagg

SEQ ID NO: 780 - DNA, 23 bp, synthetic construct
  misc_feature 1..23: note = forward primer
  source 1..23: mol_type = other DNA
gtccaaagggaaactctagatgc

SEQ ID NO: 781 - DNA, 24 bp, synthetic construct
  misc_feature 1..24: note = reverse primer
  source 1..24: mol_type = other DNA
ggagacactggatgggagtccagg

SEQ ID NO: 782 - DNA, 24 bp, synthetic construct
  misc_feature 1..24: note = forward primer
  source 1..24: mol_type = other DNA
catcagagggtcgcttcatgcagg

SEQ ID NO: 783 - DNA, 24 bp, synthetic construct
  misc_feature 1..24: note = reverse primer
  source 1..24: mol_type = other DNA
gctttggttttcagggggagttgc

SEQ ID NO: 784 - DNA, 28 bp, synthetic construct
  misc_feature 1..28: note = forward primer
  source 1..28: mol_type = other DNA
atccaaccaaatcttttattagtggtgg

SEQ ID NO: 785 - DNA, 25 bp, synthetic construct
  misc_feature 1..25: note = reverse primer
  source 1..25: mol_type = other DNA
gacttcattgaaatgcacaatcagg

SEQ ID NO: 786 - DNA, 23 bp, synthetic construct
  misc_feature 1..23: note = forward primer
  source 1..23: mol_type = other DNA
tgctctaaatccagagctggtcc

SEQ ID NO: 787 - DNA, 26 bp, synthetic construct
  misc_feature 1..26: note = reverse primer
  source 1..26: mol_type = other DNA
gtcagataagaaattccttagaatcc

SEQ ID NO: 788 - DNA, 4146 bp, synthetic construct
  misc_feature 1..4146: note = macaque cMET construct
  source 1..4146: mol_type = other DNA
atgaaggcccccgctgtgcttgcacctggcatcctcgtgctcctgtttaccttggtgcagaggagcaatggggagtgtaaagaggcactagcaaagtccgagatgaatgtgaatatgaagtatcagcttcccaacttcaccgcggaaacagccatccagaatgtcattctacatgagcatcacattttcctcggtgccaccaactacatttatgttttaaatgaggaagaccttcagaaggttgctgagtacaagaccgggcctgtgctggaacacccagattgtttcccgtgtcaggactgcagcagcaaagccaatttatcaggaggcgtttggaaagataacatcaacatggctctggttgtggacacctactatgatgatcaactcattagctgtggcagcgtcaacagagggacctgccagcgacatgtctttccccataatcatactgctgacatacagtcggaggttcactgcatattctccccacagatagaagagcccaaccagtgccctgactgtgtggtgagcgccctgggagccaaagtcctttcatctgtaaaggaccggttcatcaacttctttgtaggcaataccataaattcttcttatttcccacatcatccgttgcattcgatatcagtgagaaggctaaaggaaacgaaagatggttttatgtttttgacagaccagtcctacattgatgttttacctgagttcagagattcttaccccattaagtacatccacgcttttgaaagcaacaattttatttacttcttgacggtccaaagggaaactctaaatgctcagacttttcacacaagaataatcaggttctgttccttaaactctggattgcactcctacatggaaatgcctctagagtgtattctcacagaaaagagaaaaaagagatccacaaagaaggaagtgtttaatatccttcaggctgcatatgtcagcaagcccggggcccagcttgctagacaaataggagccagcctgaatgatgacattctctttggggtgttcgcacaaagcaagccagattctgccgaaccaatggatcgatctgcaatgtgtgcatttcctatcaaatatgtcaacgacttcttcaacaagatcgtcaacaaaaacaatgtgagatgtctccagcatttttatggacccaatcatgagcactgttttaataggacacttctgagaaattcatcaggctgtgaagcgcgccgtgatgaatatcgagcagagtttaccacagctttgcagcgggttgacttattcatgggtcaattcagcgaagtcctcttaacatctatatccaccttcgtgaaaggagacctcaccatcgctaatcttgggacatcagagggtcgcttcatgcaggttgtggtttctcgatcaggaccatcaacccctcatgtgaattttctcctggactctcacccggtgtctccagaagtgattgtggagcatccattaaaccagaatggctacacactggttgtcacggggaagaagatcaccaagatcccattgaatggcttgggctgcagacatttccagtcctgcagtcagtgcctctctgccccaccctttgtgcagtgtggctggtgccacgacaaatgtgtgcgatcggaggaatgccccagtgggacatggactcaacagatctgtctgcctgcaatctacaaggttttcccaactagtgcaccccttgaaggagggacaaggctgaccatatgtggctgggactttggatttcggaggaataataaatttgatttaaagaaaactagagttctccttggaaatgagagctgcaccttgactttaagtgagagcacgatgaatacattgaaatgcacagttggtcctgccatgaataaacatttcaatatgtccataattatttcaaatggccacgggacaacacaatacagtacattttcctatgtggatcctataataacaagtatttcgccaaaatatggccctatggctggtggcactttacttactttaactggaaattacctaaacagtggcaattctagacacatttcaattggtggaaaaacatgtactttaaaaagtgtgtcaaacagtattctcgaatgttataccccagcccaaaccatttcaactgagtttgctgttaaattgaaaattgacttagccaaccgagagacaagcatcttcagttaccgggaagaccccattgtctatgaaattcatccaaccaaatcttttattagtggtgggagcacaataacaggtgttgggaaaaacctgcattcagttagtgtcccgaggatggtcataaatgtgcatgaagcaggaaggaactttacagtggcatgtcagcatcgctctaattcagagataatctgctgtaccactccttccctgcaacagctgaatctgcaactccccctgaaaaccaaagcctttttcatgttagatgggatcctttccaaatactttgatctcatttatgtacataatcctgtgtttaagccttttgaaaagccagtaatgatctcaatgggcaatgaaaatgtactggaaattaagggaaatgatattgaccctgaagcagttaaaggtgaagtgttaaaagttggaaataagagctgtgagaatatacacttacattctgaagccgttttatgcacggtccccaatgacctgctgaaattgaacagcgagctaaatatagagtggaagcaagcaatttcttcaaccgtccttggaaaagtaatagttcaaccagatcagaatttcaccggattgattgctggtgttgtctcaatatcaatagcactcttactactacttgggcttttcctgtggctgaaaaagagaaagcaaattaaagatctgggcagtgaattagttcgctatgatgcaagagtacacactcctcatttggataggcttgtaagtgcccgaagtgtaagcccaacaacagaaatggtttcaaatgaatctgtagactaccgagctacttttccagaagatcagtttcctaattcatctcagaacggttcatgccgacaagtgcagtatcctctgacagacatgtcccccatcctgactagtggggactctgatatatccagtccattactgcaaaacactgtccacattgacctcagcgctctaaatccagagctggtccaggcagtgcagcatgtagtgattgggcccagtagcctgattgtgcatttcaatgaagtcataggaagagggcattttggttgtgtatatcatgggactttgttggacaatgatggcaagaaaattcactgtgctgtgaaatccttgaacagaatcactgacataggagaagtttcccagtttctgaccgagggaatcatcatgaaagattttagtcatcccaatgtcctctcgctcctgggaatctgcctgcgaagtgaagggtctccgctggtggtcctaccctacatgaaacatggagatcttcgaaatttcattcgaaatgagactcataatccaactgtaaaagatcttattggctttggtcttcaagtagccaaaggcatgaaatatcttgcaagcaaaaagtttgtccacagagacttggctgcaagaaactgtatgctggatgaaaaattcacagtcaaggttgctgattttggtcttgccagagacatgtatgataaagaatactatagtgtgcacaacaaaacaggtgcaaagctgccagtgaagtggatggctttggaaagtctgcaaactcaaaagtttaccaccaagtcagatgtgtggtcctttggtgtgctcctctgggagctcatgacaagaggagccccaccctatcctgatgtgaacacctttgatataactgtttacttgttgcaagggagaaggctcctacaacccgaatactgcccagaccccttatatgaagtaatgctaaaatgctggcaccctaaagcagaaatgcgcccatccttttctgaactggtgtcccggatatcagcgatcttctctactttcattggggagcactacgtccatgtaaacgctacttatgtgaacgtaaaatgtgtcgctccatatccttctctgttgtcatcagaagataacgctgatgacgaggtggacacatga

SEQ ID NO: 789 - protein, 1381 aa, synthetic construct
  REGION 1..1381: note = macaque cMET construct
MKAPAVLAPGILVLLFTLVQRSNGECKEALAKSEMNVNMKYQLPNFTAETAIQNVILHEHHIFLGATNYIYVLNEEDLQKVAEYKTGPVLEHPDCFPCQDCSSKANLSGGVWKDNINMALVVDTYYDDQLISCGSVNRGTCQRHVFPHNHTADIQSEVHCIFSPQIEEPNQCPDCVVSALGAKVLSSVKDRFINFFVGNTINSSYFPHHPLHSISVRRLKETKDGFMFLTDQSYIDVLPEFRDSYPIKYIHAFESNNFIYFLTVQRETLNAQTFHTRIIRFCSLNSGLHSYMEMPLECILTEKRKKRSTKKEVFNILQAAYVSKPGAQLARQIGASLNDDILFGVFAQSKPDSAEPMDRSAMCAFPIKYVNDFFNKIVNKNNVRCLQHFYGPNHEHCFNRTLLRNSSGCEARRDEYRAEFTTALQRVDLFMGQFSEVLLTSISTFVKGDLTIANLGTSEGRFMQVVVSRSGPSTPHVNFLLDSHPVSPEVIVEHPLNQNGYTLVVTGKKITKIPLNGLGCRHFQSCSQCLSAPPFVQCGWCHDKCVRSEECPSGTWTQQICLPAIYKVFPTSAPLEGGTRLTICGWDFGFRRNNKFDLKKTRVLLGNESCTLTLSESTMNTLKCTVGPAMNKHFNMSIIISNGHGTTQYSTFSYVDPIITSISPKYGPMAGGTLLTLTGNYLNSGNSRHISIGGKTCTLKSVSNSILECYTPAQTISTEFAVKLKIDLANRETSIFSYREDPIVYEIHPTKSFISGGSTITGVGKNLHSVSVPRMVINVHEAGRNFTVACQHRSNSEIICCTTPSLQQLNLQLPLKTKAFFMLDGILSKYFDLIYVHNPVFKPFEKPVMISMGNENVLEIKGNDIDPEAVKGEVLKVGNKSCENIHLHSEAVLCTVPNDLLKLNSELNIEWKQAISSTVLGKVIVQPDQNFTGLIAGVVSISIALLLLLGLFLWLKKRKQIKDLGSELVRYDARVHTPHLDRLVSARSVSPTTEMVSNESVDYRATFPEDQFPNSSQNGSCRQVQYPLTDMSPILTSGDSDISSPLLQNTVHIDLSALNPELVQAVQHVVIGPSSLIVHFNEVIGRGHFGCVYHGTLLDNDGKKIHCAVKSLNRITDIGEVSQFLTEGIIMKDFSHPNVLSLLGICLRSEGSPLVVLPYMKHGDLRNFIRNETHNPTVKDLIGFGLQVAKGMKYLASKKFVHRDLAARNCMLDEKFTVKVADFGLARDMYDKEYYSVHNKTGAKLPVKWMALESLQTQKFTTKSDVWSFGVLLWELMTRGAPPYPDVNTFDITVYLLQGRRLLQPEYCPDPLYEVMLKCWHPKAEMRPSFSELVSRISAIFSTFIGEHYVHVNATYVNVKCVAPYPSLLSSEDNADDEVDT

SEQ ID NO: 790 - DNA, 81 bp, synthetic construct
  misc_feature 1..81: note = CM1-VH-A-XhoI
  source 1..81: mol_type = other DNA
ccatgtctcgagtctgggsctgaastgrwgargcctggggcttcagtgaaartgtcctgcarggcttcgggctataccttc

SEQ ID NO: 791 - DNA, 74 bp, synthetic construct
  misc_feature 1..74: note = CM1-VH-B
  source 1..74: mol_type = other DNA
atccactcaagccyttgtccaggcsyctgtytaacccagtgcaaccagtagctggtgaaggtatagcccgaagc

SEQ ID NO: 792 - DNA, 68 bp, synthetic construct
  misc_feature 1..68: note = CM1-VH-C
  source 1..68: mol_type = other DNA
ggcttgagtggatkggcatgattgatccttccaatagtgacactaggtttaatccgaacttcaaggac

SEQ ID NO: 793 - DNA, 75 bp, synthetic construct
  misc_feature 1..75: note = CM1-VH-D
  source 1..75: mol_type = other DNA
gctgctgagcwscatgtaggctgtgytggmagatstgtctmyaktsawtgtgrccytgtccttgaagttcggatt

SEQ ID NO: 794 - DNA, 75 bp, synthetic construct
  misc_feature 1..75: note = CM1-VH-E
  source 1..75: mol_type = other DNA
gcctacatgswactcagcagcctgasatctgmggacactgcagtctattactgtgccasatatggtagctacgtt

SEQ ID NO: 795 - DNA, 60 bp, synthetic construct
  misc_feature 1..60: note = CM1-VH-F-BstEII
  source 1..60: mol_type = other DNA
catgtaggtgaccgaggttccttgaccccagtagtccagaggggaaacgtagctaccata

SEQ ID NO: 796 - DNA, 69 bp, synthetic construct
  misc_feature 1..69: note = CM3-VH-A-XhoI
  source 1..69: mol_type = other DNA
ccatgtctcgagtctgggrctgaastgrwgaagcctggggcttcagtgaagstgtcctgcaaggcttct

SEQ ID NO: 797 - DNA, 78 bp, synthetic construct
  misc_feature 1..78: note = CM3-VH-B
  source 1..78: mol_type = other DNA
ctcaaggccttgtccaggcsyctgcytcacccagtgtatccagtaactggtgaaggtgtagccagaagccttgcagga

SEQ ID NO: 798 - DNA, 72 bp, synthetic construct
  misc_feature 1..72: note = CM3-VH-C
  source 1..72: mol_type = other DNA
cctggacaaggccttgagtggatkggagagattaatcctagcagcggtcgtactaactacaacgagaaattc

SEQ ID NO: 799 - DNA, 61 bp, synthetic construct
  misc_feature 1..61: note = CM3-VH-D
  source 1..61: mol_type = other DNA
ctgtggaggtagatktgtctmyagtcaytgtgaccytgttcttgaatttctcgttgtagtt

SEQ ID NO: 800 - DNA, 70 bp, synthetic construct
  misc_feature 1..70: note = CM3-VH-E
  source 1..70: mol_type = other DNA
atctacctccacagyctacatgsaactcagcarcctgasatctgaggacactgcggtctattactgtgca

SEQ ID NO: 801 - DNA, 60 bp, synthetic construct
  misc_feature 1..60: note = CM3-VH-F-BstEII
  source 1..60: mol_type = other DNA
catgtaggtgaccgtggtgccttggccccagtagcccctwcttgcacagtaatagaccgc

SEQ ID NO: 802 - DNA, 84 bp, synthetic construct
  misc_feature 1..84: note = CM1-VL-A-SacI
  source 1..84: mol_type = other DNA
cctgtagagctcgtgatgacccagactccayyctccctamctgtgacasytggagagmmggyttctrtcagctgcaagtccagt

SEQ ID NO: 803 - DNA, 65 bp, synthetic construct
  misc_feature 1..65: note = CM1-VL-B
  source 1..65: mol_type = other DNA
gtaccaggccaagtagttcttctgactgctagtatataaaagggactgactggacttgcagctga

SEQ ID NO: 804 - DNA, 69 bp, synthetic construct
  misc_feature 1..69: note = CM1-VL-C
  source 1..69: mol_type = other DNA
tacttggcctggtaccwgcagaaaccaggtcagtctcctmaactgctgatttactgggcatccactagg

SEQ ID NO: 805 - DNA, 75 bp, synthetic construct
  misc_feature 1..75: note = CM1-VL-D
  source 1..75: mol_type = other DNA
gagagtgaaatctgtcccagatccactgcctgagaagcgatcagggaccccagattccctagtggatgcccagta

SEQ ID NO: 806 - DNA, 69 bp, synthetic construct
  misc_feature 1..69: note = CM1-VL-E
  source 1..69: mol_type = other DNA
acagatttcactctcamaatctccagwgtgraggctgasgacstggsagtttattactgtcagcaatat

SEQ ID NO: 807 - DNA, 84 bp, synthetic construct
  misc_feature 1..84: note = CM1-VL-F-BsiWI/SpeI
  source 1..84: mol_type = other DNA
cctcagactagtcgtacgtttgatctccaactttgtgcctccaccgaacgtccacggataggcataatattgctgacagtaata

SEQ ID NO: 808 - DNA, 75 bp, synthetic construct
  misc_feature 1..75: note = CM3-VL-A-SacI
  source 1..75: mol_type = other DNA
cctgtagagctcgtgatgacccaatctccasyttctttgsctgtgactctagggcagcsggcctccatctcctgc

SEQ ID NO: 809 - DNA, 66 bp, synthetic construct
  misc_feature 1..66: note = CM3-VL-Ba
  source 1..66: mol_type = other DNA
gaaccaactcatataactaccaccatcataatcaacactttggctggccttgcaggagatggaggc

SEQ ID NO: 810 - DNA, 69 bp, synthetic construct
  misc_feature 1..69: note = CM3-VL-Bb
  source 1..69: mol_type = other DNA
gaaccaactcatataactaccaccatcataatcaacactagattggctggccttgcaggagatggaggc

SEQ ID NO: 811 - DNA, 72 bp, synthetic construct
  misc_feature 1..72: note = CM3-VL-C
  source 1..72: mol_type = other DNA
agttatatgagttggttccaacagagaccaggacagycacccarackcctcatctmtgctgcatccaatcta

SEQ ID NO: 812 - DNA, 69 bp, synthetic construct
  misc_feature 1..69: note = CM3-VL-D
  source 1..69: mol_type = other DNA
ggtgaagtctgtcccagagccactgccactaaacctgkctgggaycccagattctagattggatgcagc

SEQ ID NO: 813 - DNA, 75 bp, synthetic construct
  misc_feature 1..75: note = CM3-VL-E
  source 1..75: mol_type = other DNA
tctgggacagacttcaccctcaakatcymtcstgtggaggmggaggatgttgsaryctattactgtcagcaaagt

SEQ ID NO: 814 - DNA, 84 bp, synthetic construct
  misc_feature 1..84: note = CM3-VL-F-BsiWI/SpeI
  source 1..84: mol_type = other DNA
cctcagactagtcgtacgtttgatctccagcttggtcccctgaccgaacgtgagcggatcctcataactttgctgacagtaata

SEQ ID NO: 815 - protein, 113 aa, synthetic construct
  REGION 1..113: note = MET-1 L
DIMMSQSPSSLTVSVGEKVTVSCKSSQSLLYTSSQKNYLAWYQQKPGQSPKLLIYWASTRESGVPDRFTGSGSGTDFTLTITSVKADDLAVYYCQQYYAYPWTFGGGTKLEIK

SEQ ID NO: 816 - protein, 17 aa, synthetic construct
  REGION 1..17: note = MET-1 L-CDR1
KSSQSLLYTSSQKNYLA

SEQ ID NO: 817 - protein, 7 aa, synthetic construct
  REGION 1..7: note = MET-1 L-CDR2
WASTRES

SEQ ID NO: 818 - protein, 9 aa, synthetic construct
  REGION 1..9: note = MET-1 L-CDR3
QQYYAYPWT

SEQ ID NO: 819 - DNA, 339 bp, synthetic construct
  misc_feature 1..339: note = MET-1 L
  source 1..339: mol_type = other DNA
gatattatgatgagtcagtcccccagcagcctgaccgtgtccgtgggcgagaaggtgaccgtgtcttgcaagagcagccagagcctgctgtacaccagcagccagaagaactatctggcttggtatcagcagaagcccggccagagcccaaagctgctgatctactgggccagcacccgggagagcggagtgcccgacagattcaccggcagcggctccggcacagacttcaccctgaccatcaccagcgtgaaggccgacgacctggccgtgtactactgccagcagtactacgcctacccctggaccttcggcggagggaccaagctggagatcaag

SEQ ID NO: 820 - protein, 119 aa, synthetic construct
  REGION 1..119: note = MET-1 H
QVQLQQSGPELVRPGASVKMSCRASGYTFTSYWLHWVKQRPGQGLEWIGMIDPSNSDTRFNPNFKDKATLNVDRSSNTAYMLLSSLTSADSAVYYCATYGSYVSPLDYWGQGTSVTVSS

SEQ ID NO: 821 - protein, 5 aa, synthetic construct
  REGION 1..5: note = MET-1 H-CDR1
SYWLH

SEQ ID NO: 822 - protein, 17 aa, synthetic construct
  REGION 1..17: note = MET-1 H-CDR2
MIDPSNSDTRFNPNFKD

SEQ ID NO: 823 - protein, 10 aa, synthetic construct
  REGION 1..10: note = MET-1 H-CDR3
YGSYVSPLDY

SEQ ID NO: 824 - DNA, 357 bp, synthetic construct
  misc_feature 1..357: note = MET-1 H
  source 1..357: mol_type = other DNA
caggtgcagctgcagcagagcggacccgagctggtgcggccaggcgcctccgtgaagatgagctgcagggccagcggctacaccttcaccagctactggctgcactgggtgaaacagagacctggacagggactggagtggatcggcatgatcgaccccagcaacagcgacaccaggttcaaccccaacttcaaggacaaggccaccctgaacgtggacaggtccagcaacaccgcctacatgctgctgtccagcctgacctctgccgacagcgccgtgtattactgtgccacctacggcagctacgtgtcccccctggactactggggccagggcacctctgtgacagtgtcctcc

SEQ ID NO: 825 - protein, 247 aa, synthetic construct
  REGION 1..247: note = MET-1 HL
QVQLQQSGPELVRPGASVKMSCRASGYTFTSYWLHWVKQRPGQGLEWIGMIDPSNSDTRFNPNFKDKATLNVDRSSNTAYMLLSSLTSADSAVYYCATYGSYVSPLDYWGQGTSVTVSSGGGGSGGGGSGGGGSDIMMSQSPSSLTVSVGEKVTVSCKSSQSLLYTSSQKNYLAWYQQKPGQSPKLLIYWASTRESGVPDRFTGSGSGTDFTLTITSVKADDLAVYYCQQYYAYPWTFGGGTKLEIK

SEQ ID NO: 826 - DNA, 741 bp, synthetic construct
  misc_feature 1..741: note = MET-1 HL
  source 1..741: mol_type = other DNA
caggtgcagctgcagcagagcggacccgagctggtgcggccaggcgcctccgtgaagatgagctgcagggccagcggctacaccttcaccagctactggctgcactgggtgaaacagagacctggacagggactggagtggatcggcatgatcgaccccagcaacagcgacaccaggttcaaccccaacttcaaggacaaggccaccctgaacgtggacaggtccagcaacaccgcctacatgctgctgtccagcctgacctctgccgacagcgccgtgtattactgtgccacctacggcagctacgtgtcccccctggactactggggccagggcacctctgtgacagtgtcctccggtggtggtggttctggcggcggcggctccggtggtggtggttctgatattatgatgagtcagtcccccagcagcctgaccgtgtccgtgggcgagaaggtgaccgtgtcttgcaagagcagccagagcctgctgtacaccagcagccagaagaactatctggcttggtatcagcagaagcccggccagagcccaaagctgctgatctactgggccagcacccgggagagcggagtgcccgacagattcaccggcagcggctccggcacagacttcaccctgaccatcaccagcgtgaaggccgacgacctggccgtgtactactgccagcagtactacgcctacccctggaccttcggcggagggaccaagctggagatcaag

SEQ ID NO: 827 - protein, 247 aa, synthetic construct
  REGION 1..247: note = MET-1 LH
DIMMSQSPSSLTVSVGEKVTVSCKSSQSLLYTSSQKNYLAWYQQKPGQSPKLLIYWASTRESGVPDRFTGSGSGTDFTLTITSVKADDLAVYYCQQYYAYPWTFGGGTKLEIKGGGGSGGGGSGGGGSQVQLQQSGPELVRPGASVKMSCRASGYTFTSYWLHWVKQRPGQGLEWIGMIDPSNSDTRFNPNFKDKATLNVDRSSNTAYMLLSSLTSADSAVYYCATYGSYVSPLDYWGQGTSVTVSS

SEQ ID NO: 828 - DNA, 741 bp, synthetic construct
  misc_feature 1..741: note = MET-1 LH
  source 1..741: mol_type = other DNA
gatattatgatgagtcagtcccccagcagcctgaccgtgtccgtgggcgagaaggtgaccgtgtcttgcaagagcagccagagcctgctgtacaccagcagccagaagaactatctggcttggtatcagcagaagcccggccagagcccaaagctgctgatctactgggccagcacccgggagagcggagtgcccgacagattcaccggcagcggctccggcacagacttcaccctgaccatcaccagcgtgaaggccgacgacctggccgtgtactactgccagcagtactacgcctacccctggaccttcggcggagggaccaagctggagatcaagggtggtggtggttctggcggcggcggctccggtggtggtggttctcaggtgcagctgcagcagagcggacccgagctggtgcggccaggcgcctccgtgaagatgagctgcagggccagcggctacaccttcaccagctactggctgcactgggtgaaacagagacctggacagggactggagtggatcggcatgatcgaccccagcaacagcgacaccaggttcaaccccaacttcaaggacaaggccaccctgaacgtggacaggtccagcaacaccgcctacatgctgctgtccagcctgacctctgccgacagcgccgtgtattactgtgccacctacggcagctacgtgtcccccctggactactggggccagggcacctctgtgacagtgtcctcc

SEQ ID NO: 829 - protein, 502 aa, synthetic construct
  REGION 1..502: note = MET-1 HL x I2C HL
QVQLQQSGPELVRPGASVKMSCRASGYTFTSYWLHWVKQRPGQGLEWIGMIDPSNSDTRFNPNFKDKATLNVDRSSNTAYMLLSSLTSADSAVYYCATYGSYVSPLDYWGQGTSVTVSSGGGGSGGGGSGGGGSDIMMSQSPSSLTVSVGEKVTVSCKSSQSLLYTSSQKNYLAWYQQKPGQSPKLLIYWASTRESGVPDRFTGSGSGTDFTLTITSVKADDLAVYYCQQYYAYPWTFGGGTKLEIKSGGGGSEVQLVESGGGLVQPGGSLKLSCAASGFTFNKYAMNWVRQAPGKGLEWVARIRSKYNNYATYYADSVKDRFTISRDDSKNTAYLQMNNLKTEDTAVYYCVRHGNFGNSYISYWAYWGQGTLVTVSSGGGGSGGGGSGGGGSQTVVTQEPSLTVSPGGTVTLTCGSSTGAVTSGNYPNWVQQKPGQAPRGLIGGTKFLAPGTPARFSGSLLGGKAALTLSGVQPEDEAEYYCVLWYSNRWVFGGGTKLTVL

SEQ ID NO: 830 - DNA, 1506 bp, synthetic construct
  misc_feature 1..1506: note = MET-1 HL x I2C HL
  source 1..1506: mol_type = other DNA
caggtgcagctgcagcagagcggacccgagctggtgcggccaggcgcctccgtgaagatgagctgcagggccagcggctacaccttcaccagctactggctgcactgggtgaaacagagacctggacagggactggagtggatcggcatgatcgaccccagcaacagcgacaccaggttcaaccccaacttcaaggacaaggccaccctgaacgtggacaggtccagcaacaccgcctacatgctgctgtccagcctgacctctgccgacagcgccgtgtattactgtgccacctacggcagctacgtgtcccccctggactactggggccagggcacctctgtgacagtgtcctccggtggtggtggttctggcggcggcggctccggtggtggtggttctgatattatgatgagtcagtcccccagcagcctgaccgtgtccgtgggcgagaaggtgaccgtgtcttgcaagagcagccagagcctgctgtacaccagcagccagaagaactatctggcttggtatcagcagaagcccggccagagcccaaagctgctgatctactgggccagcacccgggagagcggagtgcccgacagattcaccggcagcggctccggcacagacttcaccctgaccatcaccagcgtgaaggccgacgacctggccgtgtactactgccagcagtactacgcctacccctggaccttcggcggagggaccaagctggagatcaagtccggaggtggtggatccgaggtgcagctggtcgagtctggaggaggattggtgcagcctggagggtcattgaaactctcatgtgcagcctctggattcaccttcaataagtacgccatgaactgggtccgccaggctccaggaaagggtttggaatgggttgctcgcataagaagtaaatataataattatgcaacatattatgccgattcagtgaaagacaggttcaccatctccagagatgattcaaaaaacactgcctatctacaaatgaacaacttgaaaactgaggacactgccgtgtactactgtgtgagacatgggaacttcggtaatagctacatatcctactgggcttactggggccaagggactctggtcaccgtctcctcaggtggtggtggttctggcggcggcggctccggtggtggtggttctcagactgttgtgactcaggaaccttcactcaccgtatcacctggtggaacagtcacactcacttgtggctcctcgactggggctgttacatctggcaactacccaaactgggtccaacaaaaaccaggtcaggcaccccgtggtctaataggtgggactaagttcctcgcccccggtactcctgccagattctcaggctccctgcttggaggcaaggctgccctcaccctctcaggggtacagccagaggatgaggcagaatattactgtgttctatggtacagcaaccgctgggtgttcggtggaggaaccaaactgactgtccta

SEQ ID NO: 831 - protein, 501 aa, synthetic construct
  REGION 1..501: note = MET-1 LH x I2C HL
DIMMSQSPSSLTVSVGEKVTVSCKSSQSLLYTSSQKNYLAWYQQKPGQSPKLLIYWASTRESGVPDRFTGSGSGTDFTLTITSVKADDLAVYYCQQYYAYPWTFGGGTKLEIKGGGGSGGGGSGGGGSQVQLQQSGPELVRPGASVKMSCRASGYTFTSYWLHWVKQRPGQGLEWIGMIDPSNSDTRFNPNFKDKATLNVDRSSNTAYMLLSSLTSADSAVYYCATYGSYVSPLDYWGQGTSVTVSSGGGGSEVQLVESGGGLVQPGGSLKLSCAASGFTFNKYAMNWVRQAPGKGLEWVARIRSKYNNYATYYADSVKDRFTISRDDSKNTAYLQMNNLKTEDTAVYYCVRHGNFGNSYISYWAYWGQGTLVTVSSGGGGSGGGGSGGGGSQTVVTQEPSLTVSPGGTVTLTCGSSTGAVTSGNYPNWVQQKPGQAPRGLIGGTKFLAPGTPARFSGSLLGGKAALTLSGVQPEDEAEYYCVLWYSNRWVFGGGTKLTVL

SEQ ID NO: 832 - DNA, 1503 bp, synthetic construct
  misc_feature 1..1503: note = MET-1 LH x I2C HL
  source 1..1503: mol_type = other DNA
gatattatgatgagtcagtcccccagcagcctgaccgtgtccgtgggcgagaaggtgaccgtgtcttgcaagagcagccagagcctgctgtacaccagcagccagaagaactatctggcttggtatcagcagaagcccggccagagcccaaagctgctgatctactgggccagcacccgggagagcggagtgcccgacagattcaccggcagcggctccggcacagacttcaccctgaccatcaccagcgtgaaggccgacgacctggccgtgtactactgccagcagtactacgcctacccctggaccttcggcggagggaccaagctggagatcaagggtggtggtggttctggcggcggcggctccggtggtggtggttctcaggtgcagctgcagcagagcggacccgagctggtgcggccaggcgcctccgtgaagatgagctgcagggccagcggctacaccttcaccagctactggctgcactgggtgaaacagagacctggacagggactggagtggatcggcatgatcgaccccagcaacagcgacaccaggttcaaccccaacttcaaggacaaggccaccctgaacgtggacaggtccagcaacaccgcctacatgctgctgtccagcctgacctctgccgacagcgccgtgtattactgtgccacctacggcagctacgtgtcccccctggactactggggccagggcacctctgtgacagtgtcctccggaggtggtggatccgaggtgcagctggtcgagtctggaggaggattggtgcagcctggagggtcattgaaactctcatgtgcagcctctggattcaccttcaataagtacgccatgaactgggtccgccaggctccaggaaagggtttggaatgggttgctcgcataagaagtaaatataataattatgcaacatattatgccgattcagtgaaagacaggttcaccatctccagagatgattcaaaaaacactgcctatctacaaatgaacaacttgaaaactgaggacactgccgtgtactactgtgtgagacatgggaacttcggtaatagctacatatcctactgggcttactggggccaagggactctggtcaccgtctcctcaggtggtggtggttctggcggcggcggctccggtggtggtggttctcagactgttgtgactcaggaaccttcactcaccgtatcacctggtggaacagtcacactcacttgtggctcctcgactggggctgttacatctggcaactacccaaactgggtccaacaaaaaccaggtcaggcaccccgtggtctaataggtgggactaagttcctcgcccccggtactcctgccagattctcaggctccctgcttggaggcaaggctgccctcaccctctcaggggtacagccagaggatgaggcagaatattactgtgttctatggtacagcaaccgctgggtgttcggtggaggaaccaaactgactgtccta

SEQ ID NO: 833 - protein, 15 aa, synthetic construct
  REGION 1..15: note = MET-3 L-CDR1
KASQSVDYDGGSYMS

SEQ ID NO: 834 - protein, 7 aa, synthetic construct
  REGION 1..7: note = MET-3 L-CDR2
AASNLES

SEQ ID NO: 835 - protein, 9 aa, synthetic construct
  REGION 1..9: note = MET-3 L-CDR3
QQSYEDPLT

SEQ ID NO: 836 - protein, 5 aa, synthetic construct
  REGION 1..5: note = MET-3 H-CDR1
SYWIH

SEQ ID NO: 837 - protein, 17 aa, synthetic construct
  REGION 1..17: note = MET-3 H-CDR2
EINPSSGRTNYNEKFKN

SEQ ID NO: 838 - skipped

SEQ ID NO: 839 - protein, 107 aa, synthetic construct
  REGION 1..107: note = MET 4 L
DIQMTQSPSSVSASVGDRVTITCRASQGINTWLAWYQQKPGKAPKLLIYAASSLKSGVPSRFSGSGSGADFTLTISSLQPEDFATYYCQQANSFPLTFGGGTKVEIK

SEQ ID NO: 840 - protein, 11 aa, synthetic construct
  REGION 1..11: note = MET-4 L-CDR1
RASQGINTWLA

SEQ ID NO: 841 - protein, 7 aa, synthetic construct
  REGION 1..7: note = MET-4 L-CDR2
AASSLKS

SEQ ID NO: 842 - protein, 9 aa, synthetic construct
  REGION 1..9: note = MET-4 L-CDR3
QQANSFPLT

SEQ ID NO: 843 - DNA, 321 bp, synthetic construct
  misc_feature 1..321: note = MET-4 L
  source 1..321: mol_type = other DNA
gacatccagatgacccagagccccagcagcgtgtctgccagcgtgggcgacagagtgaccatcacatgtagagctagccagggcatcaacacctggctggcctggtatcagcagaagcccggcaaggcccccaagctgctgatctacgccgcttcctccctgaaatctggcgtgcccagcagattcagcggcagcggaagcggagccgacttcaccctgaccatcagcagcctgcagcccgaggacttcgccacctactactgccagcaggccaacagcttccccctgaccttcggcggagggaccaaggtggagatcaag

SEQ ID NO: 844 - protein, 117 aa, synthetic construct
  REGION 1..117: note = MET-4 H
QVQLVQSGAEVKKPGASVKVSCEASGYTFTSYGFSWVRQAPGQGLEWMGWISASNGNTYYAQKLQGRVTMTTDTSTSSAYMELRSLRSDDTAVYYCARVYADYADYWGQGTLVTVSS

SEQ ID NO: 845 - protein, 5 aa, synthetic construct
  REGION 1..5: note = MET-4 H-CDR1
SYGFS

SEQ ID NO: 846 - protein, 17 aa, synthetic construct
  REGION 1..17: note = MET-4 H-CDR2
WISASNGNTYYAQKLQG

SEQ ID NO: 847 - protein, 8 aa, synthetic construct
  REGION 1..8: note = MET-4 H-CDR3
VYADYADY

SEQ ID NO: 848 - DNA, 351 bp, synthetic construct
  misc_feature 1..351: note = MET-4 H
  source 1..351: mol_type = other DNA
caggtgcagctggtgcagagcggcgctgaggtgaagaagccaggcgccagcgtcaaggtgtcctgcgaggccagcggctacaccttcaccagctacggcttcagctgggtgcggcaggctcctggacagggactggaatggatgggctggatcagcgccagcaacggcaacacctactacgcccagaagctgcagggccgcgtcaccatgaccaccgacaccagcaccagcagcgcctacatggagctgagaagcctgagatccgacgacaccgccgtgtactactgcgccagggtgtacgccgactacgctgactactggggccagggcaccctggtgacagtgtcttcc

SEQ ID NO: 849 - protein, 239 aa, synthetic construct
  REGION 1..239: note = MET-4 HL
QVQLVQSGAEVKKPGASVKVSCEASGYTFTSYGFSWVRQAPGQGLEWMGWISASNGNTYYAQKLQGRVTMTTDTSTSSAYMELRSLRSDDTAVYYCARVYADYADYWGQGTLVTVSSGGGGSGGGGSGGGGSDIQMTQSPSSVSASVGDRVTITCRASQGINTWLAWYQQKPGKAPKLLIYAASSLKSGVPSRFSGSGSGADFTLTISSLQPEDFATYYCQQANSFPLTFGGGTKVEIK

SEQ ID NO: 850 - DNA, 717 bp, synthetic construct
  misc_feature 1..717: note = MET-4 HL
  source 1..717: mol_type = other DNA
caggtgcagctggtgcagagcggcgctgaggtgaagaagccaggcgccagcgtcaaggtgtcctgcgaggccagcggctacaccttcaccagctacggcttcagctgggtgcggcaggctcctggacagggactggaatggatgggctggatcagcgccagcaacggcaacacctactacgcccagaagctgcagggccgcgtcaccatgaccaccgacaccagcaccagcagcgcctacatggagctgagaagcctgagatccgacgacaccgccgtgtactactgcgccagggtgtacgccgactacgctgactactggggccagggcaccctggtgacagtgtcttccggtggtggtggttctggcggcggcggctccggtggtggtggttctgacatccagatgacccagagccccagcagcgtgtctgccagcgtgggcgacagagtgaccatcacatgtagagctagccagggcatcaacacctggctggcctggtatcagcagaagcccggcaaggcccccaagctgctgatctacgccgcttcctccctgaaatctggcgtgcccagcagattcagcggcagcggaagcggagccgacttcaccctgaccatcagcagcctgcagcccgaggacttcgccacctactactgccagcaggccaacagcttccccctgaccttcggcggagggaccaaggtggagatcaag

SEQ ID NO: 851 - protein, 239 aa, synthetic construct
  REGION 1..239: note = MET-4 LH
DIQMTQSPSSVSASVGDRVTITCRASQGINTWLAWYQQKPGKAPKLLIYAASSLKSGVPSRFSGSGSGADFTLTISSLQPEDFATYYCQQANSFPLTFGGGTKVEIKGGGGSGGGGSGGGGSQVQLVQSGAEVKKPGASVKVSCEASGYTFTSYGFSWVRQAPGQGLEWMGWISASNGNTYYAQKLQGRVTMTTDTSTSSAYMELRSLRSDDTAVYYCARVYADYADYWGQGTLVTVSS

SEQ ID NO: 852 - DNA, 717 bp, synthetic construct
  misc_feature 1..717: note = MET-4 LH
  source 1..717: mol_type = other DNA
gacatccagatgacccagagccccagcagcgtgtctgccagcgtgggcgacagagtgaccatcacatgtagagctagccagggcatcaacacctggctggcctggtatcagcagaagcccggcaaggcccccaagctgctgatctacgccgcttcctccctgaaatctggcgtgcccagcagattcagcggcagcggaagcggagccgacttcaccctgaccatcagcagcctgcagcccgaggacttcgccacctactactgccagcaggccaacagcttccccctgaccttcggcggagggaccaaggtggagatcaagggtggtggtggttctggcggcggcggctccggtggtggtggttctcaggtgcagctggtgcagagcggcgctgaggtgaagaagccaggcgccagcgtcaaggtgtcctgcgaggccagcggctacaccttcaccagctacggcttcagctgggtgcggcaggctcctggacagggactggaatggatgggctggatcagcgccagcaacggcaacacctactacgcccagaagctgcagggccgcgtcaccatgaccaccgacaccagcaccagcagcgcctacatggagctgagaagcctgagatccgacgacaccgccgtgtactactgcgccagggtgtacgccgactacgctgactactggggccagggcaccctggtgacagtgtcttcc

SEQ ID NO: 853 - protein, 494 aa, synthetic construct
  REGION 1..494: note = MET-4 HL x I2C HL
QVQLVQSGAEVKKPGASVKVSCEASGYTFTSYGFSWVRQAPGQGLEWMGWISASNGNTYYAQKLQGRVTMTTDTSTSSAYMELRSLRSDDTAVYYCARVYADYADYWGQGTLVTVSSGGGGSGGGGSGGGGSDIQMTQSPSSVSASVGDRVTITCRASQGINTWLAWYQQKPGKAPKLLIYAASSLKSGVPSRFSGSGSGADFTLTISSLQPEDFATYYCQQANSFPLTFGGGTKVEIKSGGGGSEVQLVESGGGLVQPGGSLKLSCAASGFTFNKYAMNWVRQAPGKGLEWVARIRSKYNNYATYYADSVKDRFTISRDDSKNTAYLQMNNLKTEDTAVYYCVRHGNFGNSYISYWAYWGQGTLVTVSSGGGGSGGGGSGGGGSQTVVTQEPSLTVSPGGTVTLTCGSSTGAVTSGNYPNWVQQKPGQAPRGLIGGTKFLAPGTPARFSGSLLGGKAALTLSGVQPEDEAEYYCVLWYSNRWVFGGGTKLTVL

SEQ ID NO: 854 - DNA, 1482 bp, synthetic construct
  misc_feature 1..1482: note = MET-4 HL x I2C HL
  source 1..1482: mol_type = other DNA
caggtgcagctggtgcagagcggcgctgaggtgaagaagccaggcgccagcgtcaaggtgtcctgcgaggccagcggctacaccttcaccagctacggcttcagctgggtgcggcaggctcctggacagggactggaatggatgggctggatcagcgccagcaacggcaacacctactacgcccagaagctgcagggccgcgtcaccatgaccaccgacaccagcaccagcagcgcctacatggagctgagaagcctgagatccgacgacaccgccgtgtactactgcgccagggtgtacgccgactacgctgactactggggccagggcaccctggtgacagtgtcttccggtggtggtggttctggcggcggcggctccggtggtggtggttctgacatccagatgacccagagccccagcagcgtgtctgccagcgtgggcgacagagtgaccatcacatgtagagctagccagggcatcaacacctggctggcctggtatcagcagaagcccggcaaggcccccaagctgctgatctacgccgcttcctccctgaaatctggcgtgcccagcagattcagcggcagcggaagcggagccgacttcaccctgaccatcagcagcctgcagcccgaggacttcgccacctactactgccagcaggccaacagcttccccctgaccttcggcggagggaccaaggtggagatcaagtccggaggtggtggatccgaggtgcagctggtcgagtctggaggaggattggtgcagcctggagggtcattgaaactctcatgtgcagcctctggattcaccttcaataagtacgccatgaactgggtccgccaggctccaggaaagggtttggaatgggttgctcgcataagaagtaaatataataattatgcaacatattatgccgattcagtgaaagacaggttcaccatctccagagatgattcaaaaaacactgcctatctacaaatgaacaacttgaaaactgaggacactgccgtgtactactgtgtgagacatgggaacttcggtaatagctacatatcctactgggcttactggggccaagggactctggtcaccgtctcctcaggtggtggtggttctggcggcggcggctccggtggtggtggttctcagactgttgtgactcaggaaccttcactcaccgtatcacctggtggaacagtcacactcacttgtggctcctcgactggggctgttacatctggcaactacccaaactgggtccaacaaaaaccaggtcaggcaccccgtggtctaataggtgggactaagttcctcgcccccggtactcctgccagattctcaggctccctgcttggaggcaaggctgccctcaccctctcaggggtacagccagaggatgaggcagaatattactgtgttctatggtacagcaaccgctgggtgttcggtggaggaaccaaactgactgtccta

SEQ ID NO: 855 - protein, 493 aa, synthetic construct
  REGION 1..493: note = MET-4 LH x I2C HL
DIQMTQSPSSVSASVGDRVTITCRASQGINTWLAWYQQKPGKAPKLLIYAASSLKSGVPSRFSGSGSGADFTLTISSLQPEDFATYYCQQANSFPLTFGGGTKVEIKGGGGSGGGGSGGGGSQVQLVQSGAEVKKPGASVKVSCEASGYTFTSYGFSWVRQAPGQGLEWMGWISASNGNTYYAQKLQGRVTMTTDTSTSSAYMELRSLRSDDTAVYYCARVYADYADYWGQGTLVTVSSGGGGSEVQLVESGGGLVQPGGSLKLSCAASGFTFNKYAMNWVRQAPGKGLEWVARIRSKYNNYATYYADSVKDRFTISRDDSKNTAYLQMNNLKTEDTAVYYCVRHGNFGNSYISYWAYWGQGTLVTVSSGGGGSGGGGSGGGGSQTVVTQEPSLTVSPGGTVTLTCGSSTGAVTSGNYPNWVQQKPGQAPRGLIGGTKFLAPGTPARFSGSLLGGKAALTLSGVQPEDEAEYYCVLWYSNRWVFGGGTKLTVL

SEQ ID NO: 856 - DNA, 1479 bp, synthetic construct
  misc_feature 1..1479: note = MET-4 LH x I2C HL
  source 1..1479: mol_type = other DNA
gacatccagatgacccagagccccagcagcgtgtctgccagcgtgggcgacagagtgaccatcacatgtagagctagccagggcatcaacacctggctggcctggtatcagcagaagcccggcaaggcccccaagctgctgatctacgccgcttcctccctgaaatctggcgtgcccagcagattcagcggcagcggaagcggagccgacttcaccctgaccatcagcagcctgcagcccgaggacttcgccacctactactgccagcaggccaacagcttccccctgaccttcggcggagggaccaaggtggagatcaagggtggtggtggttctggcggcggcggctccggtggtggtggttctcaggtgcagctggtgcagagcggcgctgaggtgaagaagccaggcgccagcgtcaaggtgtcctgcgaggccagcggctacaccttcaccagctacggcttcagctgggtgcggcaggctcctggacagggactggaatggatgggctggatcagcgccagcaacggcaacacctactacgcccagaagctgcagggccgcgtcaccatgaccaccgacaccagcaccagcagcgcctacatggagctgagaagcctgagatccgacgacaccgccgtgtactactgcgccagggtgtacgccgactacgctgactactggggccagggcaccctggtgacagtgtcttccggaggtggtggatccgaggtgcagctggtcgagtctggaggaggattggtgcagcctggagggtcattgaaactctcatgtgcagcctctggattcaccttcaataagtacgccatgaactgggtccgccaggctccaggaaagggtttggaatgggttgctcgcataagaagtaaatataataattatgcaacatattatgccgattcagtgaaagacaggttcaccatctccagagatgattcaaaaaacactgcctatctacaaatgaacaacttgaaaactgaggacactgccgtgtactactgtgtgagacatgggaacttcggtaatagctacatatcctactgggcttactggggccaagggactctggtcaccgtctcctcaggtggtggtggttctggcggcggcggctccggtggtggtggttctcagactgttgtgactcaggaaccttcactcaccgtatcacctggtggaacagtcacactcacttgtggctcctcgactggggctgttacatctggcaactacccaaactgggtccaacaaaaaccaggtcaggcaccccgtggtctaataggtgggactaagttcctcgcccccggtactcctgccagattctcaggctccctgcttggaggcaaggctgccctcaccctctcaggggtacagccagaggatgaggcagaatattactgtgttctatggtacagcaaccgctgggtgttcggtggaggaaccaaactgactgtccta

SEQ ID NO: 857 - protein, 109 aa, synthetic construct
  REGION 1..109: note = MET-5 L
EIVLTQSPGTLSLSPGERATLSCRASQSVSNNYLAWYQQKPGQAPRLLIFGASSRATGIPDRFSGSGSGTDFTLTISRLEPEDFAVYYCQQYDISPMYSFGQGTKLEMK

SEQ ID NO: 858 - protein, 12 aa, synthetic construct
  REGION 1..12: note = MET-5 L-CDR1
RASQSVSNNYLA

SEQ ID NO: 859 - protein, 7 aa, synthetic construct
  REGION 1..7: note = MET-5 L-CDR2
GASSRAT

SEQ ID NO: 860 - protein, 10 aa, synthetic construct
  REGION 1..10: note = MET-5 L-CDR3
QQYDISPMYS

SEQ ID NO: 861 - DNA, 327 bp, synthetic construct
  misc_feature 1..327: note = MET-5 L
  source 1..327: mol_type = other DNA
gagatcgtgctgacccagagcccaggcaccctgagcctgagcccaggcgagagagccaccctgagctgcagagccagccagagcgtgtccaacaactatctggcttggtatcagcagaaaccaggacaggctcccagactgctgatcttcggcgccagctctagagccaccggcatccccgacagattcagtggtagcggctccggcacagacttcaccctgaccatttccagactggaacccgaggacttcgccgtgtactactgccagcagtacgacatcagccccatgtacagcttcggccagggcaccaagctggagatgaag

SEQ ID NO: 862 - protein, 135 aa, synthetic construct
  REGION 1..135: note = MET-5 H
QVQLQESGPGLVKPSQTLSLTCTVSGGSISSGGYYWSWIRQHPGKGLEWIGYIYYSGSTYYNPSLKSRVTISVDTSKNQFSLKLSSVTAADTAVYYCARDGPLGYCSSTSCPVTGEYYYYGMDVWGQGTTVTVSS

SEQ ID NO: 863 - protein, 7 aa, synthetic construct
  REGION 1..7: note = MET-5 H-CDR1
SGGYYWS

SEQ ID NO: 864 - protein, 16 aa, synthetic construct
  REGION 1..16: note = MET-5 H-CDR2
YIYYSGSTYYNPSLKS

SEQ ID NO: 865 - protein, 25 aa, synthetic construct
  REGION 1..25: note = MET-5 H-CDR3
DGPLGYCSSTSCPVTGEYYYYGMDV

SEQ ID NO: 866 - DNA, 405 bp, synthetic construct
  misc_feature 1..405: note = MET-5 H
  source 1..405: mol_type = other DNA
caggtgcagctgcaggagagcgggcctggactggtgaagcccagccagaccctgtctctgacctgcaccgtgtccggcggcagcatcagcagcggcggctactactggtcctggatcaggcagcacccaggcaagggcctggagtggatcggctacatctactattctggatccacctactacaaccccagcctgaagtccagagtgaccatctccgtggacaccagcaagaaccagttcagcctgaagctgtccagcgtgacagccgccgacaccgccgtgtattattgcgccagggacggcccactgggatattgttcctccacatcctgcccagtgaccggcgagtactactactacggcatggacgtgtggggacagggcaccaccgtgaccgtgtcttcc

SEQ ID NO: 867 - protein, 259 aa, synthetic construct
  REGION 1..259: note = MET-5 HL
QVQLQESGPGLVKPSQTLSLTCTVSGGSISSGGYYWSWIRQHPGKGLEWIGYIYYSGSTYYNPSLKSRVTISVDTSKNQFSLKLSSVTAADTAVYYCARDGPLGYCSSTSCPVTGEYYYYGMDVWGQGTTVTVSSGGGGSGGGGSGGGGSEIVLTQSPGTLSLSPGERATLSCRASQSVSNNYLAWYQQKPGQAPRLLIFGASSRATGIPDRFSGSGSGTDFTLTISRLEPEDFAVYYCQQYDISPMYSFGQGTKLEMK

SEQ ID NO: 868 - DNA, 777 bp, synthetic construct
  misc_feature 1..777: note = MET-5 HL
  source 1..777: mol_type = other DNA
caggtgcagctgcaggagagcgggcctggactggtgaagcccagccagaccctgtctctgacctgcaccgtgtccggcggcagcatcagcagcggcggctactactggtcctggatcaggcagcacccaggcaagggcctggagtggatcggctacatctactattctggatccacctactacaaccccagcctgaagtccagagtgaccatctccgtggacaccagcaagaaccagttcagcctgaagctgtccagcgtgacagccgccgacaccgccgtgtattattgcgccagggacggcccactgggatattgttcctccacatcctgcccagtgaccggcgagtactactactacggcatggacgtgtggggacagggcaccaccgtgaccgtgtcttccggtggtggtggttctggcggcggcggctccggtggtggtggttctgagatcgtgctgacccagagcccaggcaccctgagcctgagcccaggcgagagagccaccctgagctgcagagccagccagagcgtgtccaacaactatctggcttggtatcagcagaaaccaggacaggctcccagactgctgatcttcggcgccagctctagagccaccggcatccccgacagattcagtggtagcggctccggcacagacttcaccctgaccatttccagactggaacccgaggacttcgccgtgtactactgccagcagtacgacatcagccccatgtacagcttcggccagggcaccaagctggagatgaag

SEQ ID NO: 869 - protein, 259 aa, synthetic construct
  REGION 1..259: note = MET-5 LH
EIVLTQSPGTLSLSPGERATLSCRASQSVSNNYLAWYQQKPGQAPRLLIFGASSRATGIPDRFSGSGSGTDFTLTISRLEPEDFAVYYCQQYDISPMYSFGQGTKLEMKGGGGSGGGGSGGGGSQVQLQESGPGLVKPSQTLSLTCTVSGGSISSGGYYWSWIRQHPGKGLEWIGYIYYSGSTYYNPSLKSRVTISVDTSKNQFSLKLSSVTAADTAVYYCARDGPLGYCSSTSCPVTGEYYYYGMDVWGQGTTVTVSS

SEQ ID NO: 870 - DNA, 777 bp, synthetic construct
  misc_feature 1..777: note = MET-5 LH
  source 1..777: mol_type = other DNA
gagatcgtgctgacccagagcccaggcaccctgagcctgagcccaggcgagagagccaccctgagctgcagagccagccagagcgtgtccaacaactatctggcttggtatcagcagaaaccaggacaggctcccagactgctgatcttcggcgccagctctagagccaccggcatccccgacagattcagtggtagcggctccggcacagacttcaccctgaccatttccagactggaacccgaggacttcgccgtgtactactgccagcagtacgacatcagccccatgtacagcttcggccagggcaccaagctggagatgaagggtggtggtggttctggcggcggcggctccggtggtggtggttctcaggtgcagctgcaggagagcgggcctggactggtgaagcccagccagaccctgtctctgacctgcaccgtgtccggcggcagcatcagcagcggcggctactactggtcctggatcaggcagcacccaggcaagggcctggagtggatcggctacatctactattctggatccacctactacaaccccagcctgaagtccagagtgaccatctccgtggacaccagcaagaaccagttcagcctgaagctgtccagcgtgacagccgccgacaccgccgtgtattattgcgccagggacggcccactgggatattgttcctccacatcctgcccagtgaccggcgagtactactactacggcatggacgtgtggggacagggcaccaccgtgaccgtgtcttcc

SEQ ID NO: 871 - protein, 514 aa, synthetic construct
  REGION 1..514: note = MET-5 HL x I2C HL
QVQLQESGPGLVKPSQTLSLTCTVSGGSISSGGYYWSWIRQHPGKGLEWIGYIYYSGSTYYNPSLKSRVTISVDTSKNQFSLKLSSVTAADTAVYYCARDGPLGYCSSTSCPVTGEYYYYGMDVWGQGTTVTVSSGGGGSGGGGSGGGGSEIVLTQSPGTLSLSPGERATLSCRASQSVSNNYLAWYQQKPGQAPRLLIFGASSRATGIPDRFSGSGSGTDFTLTISRLEPEDFAVYYCQQYDISPMYSFGQGTKLEMKSGGGGSEVQLVESGGGLVQPGGSLKLSCAASGFTFNKYAMNWVRQAPGKGLEWVARIRSKYNNYATYYADSVKDRFTISRDDSKNTAYLQMNNLKTEDTAVYYCVRHGNFGNSYISYWAYWGQGTLVTVSSGGGGSGGGGSGGGGSQTVVTQEPSLTVSPGGTVTLTCGSSTGAVTSGNYPNWVQQKPGQAPRGLIGGTKFLAPGTPARFSGSLLGGKAALTLSGVQPEDEAEYYCVLWYSNRWVFGGGTKLTVL

SEQ ID NO: 872 - DNA, 1542 bp, synthetic construct
  misc_feature 1..1542: note = MET-5 HL x I2C HL
  source 1..1542: mol_type = other DNA
caggtgcagctgcaggagagcgggcctggactggtgaagcccagccagaccctgtctctgacctgcaccgtgtccggcggcagcatcagcagcggcggctactactggtcctggatcaggcagcacccaggcaagggcctggagtggatcggctacatctactattctggatccacctactacaaccccagcctgaagtccagagtgaccatctccgtggacaccagcaagaaccagttcagcctgaagctgtccagcgtgacagccgccgacaccgccgtgtattattgcgccagggacggcccactgggatattgttcctccacatcctgcccagtgaccggcgagtactactactacggcatggacgtgtggggacagggcaccaccgtgaccgtgtcttccggtggtggtggttctggcggcggcggctccggtggtggtggttctgagatcgtgctgacccagagcccaggcaccctgagcctgagcccaggcgagagagccaccctgagctgcagagccagccagagcgtgtccaacaactatctggcttggtatcagcagaaaccaggacaggctcccagactgctgatcttcggcgccagctctagagccaccggcatccccgacagattcagtggtagcggctccggcacagacttcaccctgaccatttccagactggaacccgaggacttcgccgtgtactactgccagcagtacgacatcagccccatgtacagcttcggccagggcaccaagctggagatgaagtccggaggtggtggatccgaggtgcagctggtcgagtctggaggaggattggtgcagcctggagggtcattgaaactctcatgtgcagcctctggattcaccttcaataagtacgccatgaactgggtccgccaggctccaggaaagggtttggaatgggttgctcgcataagaagtaaatataataattatgcaacatattatgccgattcagtgaaagacaggttcaccatctccagagatgattcaaaaaacactgcctatctacaaatgaacaacttgaaaactgaggacactgccgtgtactactgtgtgagacatgggaacttcggtaatagctacatatcctactgggcttactggggccaagggactctggtcaccgtctcctcaggtggtggtggttctggcggcggcggctccggtggtggtggttctcagactgttgtgactcaggaaccttcactcaccgtatcacctggtggaacagtcacactcacttgtggctcctcgactggggctgttacatctggcaactacccaaactgggtccaacaaaaaccaggtcaggcaccccgtggtctaataggtgggactaagttcctcgcccccggtactcctgccagattctcaggctccctgcttggaggcaaggctgccctcaccctctcaggggtacagccagaggatgaggcagaatattactgtgttctatggtacagcaaccgctgggtgttcggtggaggaaccaaactgactgtccta

SEQ ID NO: 873 - protein, 513 aa, synthetic construct [sequence omitted]

SEQ ID NO: 874 - DNA, 1539 bp, synthetic construct
  misc_feature 1..1539: note = MET-5 LH x I2C HL
  source 1..1539: mol_type = other DNA
gagatcgtgctgacccagagcccaggcaccctgagcctgagcccaggcgagagagccaccctgagctgcagagccagccagagcgtgtccaacaactatctggcttggtatcagcagaaaccaggacaggctcccagactgctgatcttcggcgccagctctagagccaccggcatccccgacagattcagtggtagcggctccggcacagacttcaccctgaccatttccagactggaacccgaggacttcgccgtgtactactgccagcagtacgacatcagccccatgtacagcttcggccagggcaccaagctggagatgaagggtggtggtggttctggcggcggcggctccggtggtggtggttctcaggtgcagctgcaggagagcgggcctggactggtgaagcccagccagaccctgtctctgacctgcaccgtgtccggcggcagcatcagcagcggcggctactactggtcctggatcaggcagcacccaggcaagggcctggagtggatcggctacatctactattctggatccacctactacaaccccagcctgaagtccagagtgaccatctccgtggacaccagcaagaaccagttcagcctgaagctgtccagcgtgacagccgccgacaccgccgtgtattattgcgccagggacggcccactgggatattgttcctccacatcctgcccagtgaccggcgagtactactactacggcatggacgtgtggggacagggcaccaccgtgaccgtgtcttccggaggtggtggatccgaggtgcagctggtcgagtctggaggaggattggtgcagcctggagggtcattgaaactctcatgtgcagcctctggattcaccttcaataagtacgccatgaactgggtccgccaggctccaggaaagggtttggaatgggttgctcgcataagaagtaaatataataattatgcaacatattatgccgattcagtgaaagacaggttcaccatctccagagatgattcaaaaaacactgcctatctacaaatgaacaacttgaaaactgaggacactgccgtgtactactgtgtgagacatgggaacttcggtaatagctacatatcctactgggcttactggggccaagggactctggtcaccgtctcctcaggtggtggtggttctggcggcggcggctccggtggtggtggttctcagactgttgtgactcaggaaccttcactcaccgtatcacctggtggaacagtcacactcacttgtggctcctcgactggggctgttacatctggcaactacccaaactgggtccaacaaaaaccaggtcaggcaccccgtggtctaataggtgggactaagttcctcgcccccggtactcctgccagattctcaggctccctgcttggaggcaaggctgccctcaccctctcaggggtacagccagaggatgaggcagaatattactgtgttctatggtacagcaaccgctgggtgttcggtggaggaaccaaactgactgtccta

SEQ ID NO: 875 - protein, 107 aa, synthetic construct
  REGION 1..107: note = MET-6 L
DIQMTQSPSSVSASVGDRVTITCRASQGISSWLAWYQQKPGKAPKLLIYAASSLQSGVPSRFSGSGSGTDFTLTISSLQSEDFATYYCQQANSFPITFGPGTKVEIK

SEQ ID NO: 876 - protein, 11 aa, synthetic construct
  REGION 1..11: note = MET-6 L-CDR1
RASQGISSWLA

SEQ ID NO: 877 - protein, 7 aa, synthetic construct
  REGION 1..7: note = MET-6 L-CDR2
AASSLQS

SEQ ID NO: 878 - protein, 9 aa, synthetic construct
  REGION 1..9: note = MET-6 L-CDR3
QQANSFPIT

SEQ ID NO: 879 - DNA, 321 bp, synthetic construct
  misc_feature 1..321: note = MET-6 L
  source 1..321: mol_type = other DNA
gacatccagatgacccagagccccagcagcgtgtctgccagcgtgggcgacagagtgaccatcacctgcagagcttcccagggcatctctagctggctggcctggtatcagcagaagcccggcaaggcccccaagctcctgatctatgctgcttccagcctgcagagcggcgtgcccagcagattcagcggcagcggctccggcacagacttcaccctgaccatcagctccctgcagtccgaggacttcgccacctactactgccagcaggccaacagcttccccatcaccttcggcccaggcaccaaggtggagatcaag

SEQ ID NO: 880 - protein, 118 aa, synthetic construct
  REGION 1..118: note = MET-6 H
QLQLQESGPGLVKPSETLSLTCTVSGGSISSSSYYGGWIRQPPGKGLDWIGSIYYSGNTYYNPSLKSRVTISVDTSKNQFSLKLSSVTAADTAVYYCARHSWDYFDYWDQGTLVTVSS

SEQ ID NO: 881 - protein, 7 aa, synthetic construct
  REGION 1..7: note = MET-6 H-CDR1
SSSYYGG

SEQ ID NO: 882 - protein, 16 aa, synthetic construct
  REGION 1..16: note = MET-6 H-CDR2
SIYYSGNTYYNPSLKS

SEQ ID NO: 883 - protein, 8 aa, synthetic construct
  REGION 1..8: note = MET-6 H-CDR3
HSWDYFDY

SEQ ID NO: 884 - DNA, 354 bp, synthetic construct
  misc_feature 1..354: note = MET-6 H
  source 1..354: mol_type = other DNA
cagctccagctccaggagagcgggcctggactggtgaagcccagcgagacactgagcctgacctgcaccgtgtccggcggcagcatcagcagcagcagctactacggcggctggatcagacagccacccggcaaaggactggattggatcggatccatctattatagtggaaacacctactacaaccccagcctgaagtcccgcgtgaccatctccgtggacaccagcaagaaccagttcagcctgaagctgtccagcgtgacagccgccgacaccgccgtgtactactgcgccaggcacagctgggactacttcgactactgggaccagggcaccctggtgaccgtgtcttcc

SEQ ID NO: 885 - protein, 240 aa, synthetic construct
  REGION 1..240: note = MET-6 HL
QLQLQESGPGLVKPSETLSLTCTVSGGSISSSSYYGGWIRQPPGKGLDWIGSIYYSGNTYYNPSLKSRVTISVDTSKNQFSLKLSSVTAADTAVYYCARHSWDYFDYWDQGTLVTVSSGGGGSGGGGSGGGGSDIQMTQSPSSVSASVGDRVTITCRASQGISSWLAWYQQKPGKAPKLLIYAASSLQSGVPSRFSGSGSGTDFTLTISSLQSEDFATYYCQQANSFPITFGPGTKVEIK

SEQ ID NO: 886 - DNA, 720 bp, synthetic construct
  misc_feature 1..720: note = MET-6 HL
  source 1..720: mol_type = other DNA
cagctccagctccaggagagcgggcctggactggtgaagcccagcgagacactgagcctgacctgcaccgtgtccggcggcagcatcagcagcagcagctactacggcggctggatcagacagccacccggcaaaggactggattggatcggatccatctattatagtggaaacacctactacaaccccagcctgaagtcccgcgtgaccatctccgtggacaccagcaagaaccagttcagcctgaagctgtccagcgtgacagccgccgacaccgccgtgtactactgcgccaggcacagctgggactacttcgactactgggaccagggcaccctggtgaccgtgtcttccggtggtggtggttctggcggcggcggctccggtggtggtggttctgacatccagatgacccagagccccagcagcgtgtctgccagcgtgggcgacagagtgaccatcacctgcagagcttcccagggcatctctagctggctggcctggtatcagcagaagcccggcaaggcccccaagctcctgatctatgctgcttccagcctgcagagcggcgtgcccagcagattcagcggcagcggctccggcacagacttcaccctgaccatcagctccctgcagtccgaggacttcgccacctactactgccagcaggccaacagcttccccatcaccttcggcccaggcaccaaggtggagatcaag

SEQ ID NO: 887 - protein, 240 aa, synthetic construct
  REGION 1..240: note = MET-6 LH
DIQMTQSPSSVSASVGDRVTITCRASQGISSWLAWYQQKPGKAPKLLIYAASSLQSGVPSRFSGSGSGTDFTLTISSLQSEDFATYYCQQANSFPITFGPGTKVEIKGGGGSGGGGSGGGGSQLQLQESGPGLVKPSETLSLTCTVSGGSISSSSYYGGWIRQPPGKGLDWIGSIYYSGNTYYNPSLKSRVTISVDTSKNQFSLKLSSVTAADTAVYYCARHSWDYFDYWDQGTLVTVSS

SEQ ID NO: 888 - DNA, 720 bp, synthetic construct
  misc_feature 1..720: note = MET-6 LH
  source 1..720: mol_type = other DNA
gacatccagatgacccagagccccagcagcgtgtctgccagcgtgggcgacagagtgaccatcacctgcagagcttcccagggcatctctagctggctggcctggtatcagcagaagcccggcaaggcccccaagctcctgatctatgctgcttccagcctgcagagcggcgtgcccagcagattcagcggcagcggctccggcacagacttcaccctgaccatcagctccctgcagtccgaggacttcgccacctactactgccagcaggccaacagcttccccatcaccttcggcccaggcaccaaggtggagatcaagggtggtggtggttctggcggcggcggctccggtggtggtggttctcagctccagctccaggagagcgggcctggactggtgaagcccagcgagacactgagcctgacctgcaccgtgtccggcggcagcatcagcagcagcagctactacggcggctggatcagacagccacccggcaaaggactggattggatcggatccatctattatagtggaaacacctactacaaccccagcctgaagtcccgcgtgaccatctccgtggacaccagcaagaaccagttcagcctgaagctgtccagcgtgacagccgccgacaccgccgtgtactactgcgccaggcacagctgggactacttcgactactgggaccagggcaccctggtgaccgtgtcttcc

SEQ ID NO: 889 - protein, 495 aa, synthetic construct
  REGION 1..495: note = MET-6 HL x I2C HL
QLQLQESGPGLVKPSETLSLTCTVSGGSISSSSYYGGWIRQPPGKGLDWIGSIYYSGNTYYNPSLKSRVTISVDTSKNQFSLKLSSVTAADTAVYYCARHSWDYFDYWDQGTLVTVSSGGGGSGGGGSGGGGSDIQMTQSPSSVSASVGDRVTITCRASQGISSWLAWYQQKPGKAPKLLIYAASSLQSGVPSRFSGSGSGTDFTLTISSLQSEDFATYYCQQANSFPITFGPGTKVEIKSGGGGSEVQLVESGGGLVQPGGSLKLSCAASGFTFNKYAMNWVRQAPGKGLEWVARIRSKYNNYATYYADSVKDRFTISRDDSKNTAYLQMNNLKTEDTAVYYCVRHGNFGNSYISYWAYWGQGTLVTVSSGGGGSGGGGSGGGGSQTVVTQEPSLTVSPGGTVTLTCGSSTGAVTSGNYPNWVQQKPGQAPRGLIGGTKFLAPGTPARFSGSLLGGKAALTLSGVQPEDEAEYYCVLWYSNRWVFGGGTKLTVL

SEQ ID NO: 890 - DNA, 1485 bp, synthetic construct
  misc_feature 1..1485: note = MET-6 HL x I2C HL
  source 1..1485: mol_type = other DNA
cagctccagctccaggagagcgggcctggactggtgaagcccagcgagacactgagcctgacctgcaccgtgtccggcggcagcatcagcagcagcagctactacggcggctggatcagacagccacccggcaaaggactggattggatcggatccatctattatagtggaaacacctactacaaccccagcctgaagtcccgcgtgaccatctccgtggacaccagcaagaaccagttcagcctgaagctgtccagcgtgacagccgccgacaccgccgtgtactactgcgccaggcacagctgggactacttcgactactgggaccagggcaccctggtgaccgtgtcttccggtggtggtggttctggcggcggcggctccggtggtggtggttctgacatccagatgacccagagccccagcagcgtgtctgccagcgtgggcgacagagtgaccatcacctgcagagcttcccagggcatctctagctggctggcctggtatcagcagaagcccggcaaggcccccaagctcctgatctatgctgcttccagcctgcagagcggcgtgcccagcagattcagcggcagcggctccggcacagacttcaccctgaccatcagctccctgcagtccgaggacttcgccacctactactgccagcaggccaacagcttccccatcaccttcggcccaggcaccaaggtggagatcaagtccggaggtggtggatccgaggtgcagctggtcgagtctggaggaggattggtgcagcctggagggtcattgaaactctcatgtgcagcctctggattcaccttcaataagtacgccatgaactgggtccgccaggctccaggaaagggtttggaatgggttgctcgcataagaagtaaatataataattatgcaacatattatgccgattcagtgaaagacaggttcaccatctccagagatgattcaaaaaacactgcctatctacaaatgaacaacttgaaaactgaggacactgccgtgtactactgtgtgagacatgggaacttcggtaatagctacatatcctactgggcttactggggccaagggactctggtcaccgtctcctcaggtggtggtggttctggcggcggcggctccggtggtggtggttctcagactgttgtgactcaggaaccttcactcaccgtatcacctggtggaacagtcacactcacttgtggctcctcgactggggctgttacatctggcaactacccaaactgggtccaacaaaaaccaggtcaggcaccccgtggtctaataggtgggactaagttcctcgcccccggtactcctgccagattctcaggctccctgcttggaggcaaggctgccctcaccctctcaggggtacagccagaggatgaggcagaatattactgtgttctatggtacagcaaccgctgggtgttcggtggaggaaccaaactgactgtccta

SEQ ID NO: 891 - protein, 494 aa, synthetic construct
  REGION 1..494: note = MET-6 LH x I2C HL
DIQMTQSPSSVSASVGDRVTITCRASQGISSWLAWYQQKPGKAPKLLIYAASSLQSGVPSRFSGSGSGTDFTLTISSLQSEDFATYYCQQANSFPITFGPGTKVEIKGGGGSGGGGSGGGGSQLQLQESGPGLVKPSETLSLTCTVSGGSISSSSYYGGWIRQPPGKGLDWIGSIYYSGNTYYNPSLKSRVTISVDTSKNQFSLKLSSVTAADTAVYYCARHSWDYFDYWDQGTLVTVSSGGGGSEVQLVESGGGLVQPGGSLKLSCAASGFTFNKYAMNWVRQAPGKGLEWVARIRSKYNNYATYYADSVKDRFTISRDDSKNTAYLQMNNLKTEDTAVYYCVRHGNFGNSYISYWAYWGQGTLVTVSSGGGGSGGGGSGGGGSQTVVTQEPSLTVSPGGTVTLTCGSSTGAVTSGNYPNWVQQKPGQAPRGLIGGTKFLAPGTPARFSGSLLGGKAALTLSGVQPEDEAEYYCVLWYSNRWVFGGGTKLTVL

SEQ ID NO: 892 - DNA, 1482 bp, synthetic construct
  misc_feature 1..1482: note = MET-6 LH x I2C HL
  source 1..1482: mol_type = other DNA
gacatccagatgacccagagccccagcagcgtgtctgccagcgtgggcgacagagtgaccatcacctgcagagcttcccagggcatctctagctggctggcctggtatcagcagaagcccggcaaggcccccaagctcctgatctatgctgcttccagcctgcagagcggcgtgcccagcagattcagcggcagcggctccggcacagacttcaccctgaccatcagctccctgcagtccgaggacttcgccacctactactgccagcaggccaacagcttccccatcaccttcggcccaggcaccaaggtggagatcaagggtggtggtggttctggcggcggcggctccggtggtggtggttctcagctccagctccaggagagcgggcctggactggtgaagcccagcgagacactgagcctgacctgcaccgtgtccggcggcagcatcagcagcagcagctactacggcggctggatcagacagccacccggcaaaggactggattggatcggatccatctattatagtggaaacacctactacaaccccagcctgaagtcccgcgtgaccatctccgtggacaccagcaagaaccagttcagcctgaagctgtccagcgtgacagccgccgacaccgccgtgtactactgcgccaggcacagctgggactacttcgactactgggaccagggcaccctggtgaccgtgtcttccggaggtggtggatccgaggtgcagctggtcgagtctggaggaggattggtgcagcctggagggtcattgaaactctcatgtgcagcctctggattcaccttcaataagtacgccatgaactgggtccgccaggctccaggaaagggtttggaatgggttgctcgcataagaagtaaatataataattatgcaacatattatgccgattcagtgaaagacaggttcaccatctccagagatgattcaaaaaacactgcctatctacaaatgaacaacttgaaaactgaggacactgccgtgtactactgtgtgagacatgggaacttcggtaatagctacatatcctactgggcttactggggccaagggactctggtcaccgtctcctcaggtggtggtggttctggcggcggcggctccggtggtggtggttctcagactgttgtgactcaggaaccttcactcaccgtatcacctggtggaacagtcacactcacttgtggctcctcgactggggctgttacatctggcaactacccaaactgggtccaacaaaaaccaggtcaggcaccccgtggtctaataggtgggactaagttcctcgcccccggtactcctgccagattctcaggctccctgcttggaggcaaggctgccctcaccctctcaggggtacagccagaggatgaggcagaatattactgtgttctatggtacagcaaccgctgggtgttcggtggaggaaccaaactgactgtccta

SEQ ID NO: 893 - protein, 107 aa, synthetic construct
  REGION 1..107: note = MET-7 L
DIQMTQSPSSVSASVGDRVIITCRASQGISSWLAWYQQKPGKAPKLLIYAASSLKSGVPSRFSGSGSGTDFTVTISSLQPEDFATYYCQQSNSLPWTFGQGTKVEIK

SEQ ID NO: 894 - protein, 11 aa, synthetic construct
  REGION 1..11: note = MET-7 L-CDR1
RASQGISSWLA

SEQ ID NO: 895 - protein, 7 aa, synthetic construct
  REGION 1..7: note = MET-7 L-CDR2
AASSLKS

SEQ ID NO: 896 - protein, 9 aa, synthetic construct
  REGION 1..9: note = MET-7 L-CDR3
QQSNSLPWT

SEQ ID NO: 897 - DNA, 321 bp, synthetic construct
  misc_feature 1..321: note = MET-7 L
  source 1..321: mol_type = other DNA
gacatccagatgacccagagccccagcagcgtgtctgccagcgtgggcgacagagtgatcatcacctgcagagcttcccagggcatctctagctggctggcctggtatcagcagaagcccggcaaggcccccaagctgctcatctatgctgcttccagcctgaagtccggcgtgcccagcagattcagcggcagcggctccggcacagacttcaccgtgaccatcagcagcctgcagcccgaggacttcgccacctactactgccagcagagcaacagcctgccctggaccttcggccagggcaccaaggtggagatcaag

SEQ ID NO: 898 - protein, 117 aa, synthetic construct
  REGION 1..117: note = MET-7 H
EVQLVESGGGLVQPGGSLRLSCAASGFTFSRYSMNWVRQAPGKGLEWVSYISSRSSTIYYADSVKGRFTMSRDNAKNSLYMQMNSLRDEDTAVYYCGYGDYDYFDYWGQGTLVTVSS

SEQ ID NO: 899 - protein, 5 aa, synthetic construct
  REGION 1..5: note = MET-7 H-CDR1
RYSMN

SEQ ID NO: 900 - protein, 17 aa, synthetic construct
  REGION 1..17: note = MET-7 H-CDR2
YISSRSSTIYYADSVKG

SEQ ID NO: 901 - protein, 8 aa, synthetic construct
  REGION 1..8: note = MET-7 H-CDR3
GDYDYFDY

SEQ ID NO: 902 - DNA, 351 bp, synthetic construct
  misc_feature 1..351: note = MET-7 H
  source 1..351: mol_type = other DNA
gaggtgcagctggtcgagtctggcggaggactggtgcagccaggcggcagcctgagactgtcctgtgctgcttctggattcaccttcagcaggtacagcatgaactgggtccgccaggctcctggtaaaggactggagtgggtctcctacatcagcagcaggtccagcaccatctactacgccgacagcgtgaagggcaggttcaccatgagcagggacaacgccaagaacagcctgtacatgcagatgaacagcctgagggacgaggacaccgccgtgtactactgcggctacggcgactacgactacttcgactactggggccagggaaccctggtgaccgtgtcttcc

SEQ ID NO: 903 - protein, 239 aa, synthetic construct
  REGION 1..239: note = MET-7 LH
DIQMTQSPSSVSASVGDRVIITCRASQGISSWLAWYQQKPGKAPKLLIYAASSLKSGVPSRFSGSGSGTDFTVTISSLQPEDFATYYCQQSNSLPWTFGQGTKVEIKGGGGSGGGGSGGGGSEVQLVESGGGLVQPGGSLRLSCAASGFTFSRYSMNWVRQAPGKGLEWVSYISSRSSTIYYADSVKGRFTMSRDNAKNSLYMQMNSLRDEDTAVYYCGYGDYDYFDYWGQGTLVTVSS

SEQ ID NO: 904 - DNA, 717 bp, synthetic construct
  misc_feature 1..717: note = MET-7 LH
  source 1..717: mol_type = other DNA
gacatccagatgacccagagccccagcagcgtgtctgccagcgtgggcgacagagtgatcatcacctgcagagcttcccagggcatctctagctggctggcctggtatcagcagaagcccggcaaggcccccaagctgctcatctatgctgcttccagcctgaagtccggcgtgcccagcagattcagcggcagcggctccggcacagacttcaccgtgaccatcagcagcctgcagcccgaggacttcgccacctactactgccagcagagcaacagcctgccctggaccttcggccagggcaccaaggtggagatcaagggtggtggtggttctggcggcggcggctccggtggtggtggttctgaggtgcagctggtcgagtctggcggaggactggtgcagccaggcggcagcctgagactgtcctgtgctgcttctggattcaccttcagcaggtacagcatgaactgggtccgccaggctcctggtaaaggactggagtgggtctcctacatcagcagcaggtccagcaccatctactacgccgacagcgtgaagggcaggttcaccatgagcagggacaacgccaagaacagcctgtacatgcagatgaacagcctgagggacgaggacaccgccgtgtactactgcggctacggcgactacgactacttcgactactggggccagggaaccctggtgaccgtgtcttcc

SEQ ID NO: 905 - protein, 493 aa, synthetic construct
  REGION 1..493: note = MET-7 LH x I2C HL
DIQMTQSPSSVSASVGDRVIITCRASQGISSWLAWYQQKPGKAPKLLIYAASSLKSGVPSRFSGSGSGTDFTVTISSLQPEDFATYYCQQSNSLPWTFGQGTKVEIKGGGGSGGGGSGGGGSEVQLVESGGGLVQPGGSLRLSCAASGFTFSRYSMNWVRQAPGKGLEWVSYISSRSSTIYYADSVKGRFTMSRDNAKNSLYMQMNSLRDEDTAVYYCGYGDYDYFDYWGQGTLVTVSSGGGGSEVQLVESGGGLVQPGGSLKLSCAASGFTFNKYAMNWVRQAPGKGLEWVARIRSKYNNYATYYADSVKDRFTISRDDSKNTAYLQMNNLKTEDTAVYYCVRHGNFGNSYISYWAYWGQGTLVTVSSGGGGSGGGGSGGGGSQTVVTQEPSLTVSPGGTVTLTCGSSTGAVTSGNYPNWVQQKPGQAPRGLIGGTKFLAPGTPARFSGSLLGGKAALTLSGVQPEDEAEYYCVLWYSNRWVFGGGTKLTVL

SEQ ID NO: 906 - DNA, 1479 bp, synthetic construct
  misc_feature 1..1479: note = MET-7 LH x I2C HL
  source 1..1479: mol_type = other DNA
gacatccagatgacccagagccccagcagcgtgtctgccagcgtgggcgacagagtgatcatcacctgcagagcttcccagggcatctctagctggctggcctggtatcagcagaagcccggcaaggcccccaagctgctcatctatgctgcttccagcctgaagtccggcgtgcccagcagattcagcggcagcggctccggcacagacttcaccgtgaccatcagcagcctgcagcccgaggacttcgccacctactactgccagcagagcaacagcctgccctggaccttcggccagggcaccaaggtggagatcaagggtggtggtggttctggcggcggcggctccggtggtggtggttctgaggtgcagctggtcgagtctggcggaggactggtgcagccaggcggcagcctgagactgtcctgtgctgcttctggattcaccttcagcaggtacagcatgaactgggtccgccaggctcctggtaaaggactggagtgggtctcctacatcagcagcaggtccagcaccatctactacgccgacagcgtgaagggcaggttcaccatgagcagggacaacgccaagaacagcctgtacatgcagatgaacagcctgagggacgaggacaccgccgtgtactactgcggctacggcgactacgactacttcgactactggggccagggaaccctggtgaccgtgtcttccggaggtggtggatccgaggtgcagctggtcgagtctggaggaggattggtgcagcctggagggtcattgaaactctcatgtgcagcctctggattcaccttcaataagtacgccatgaactgggtccgccaggctccaggaaagggtttggaatgggttgctcgcataagaagtaaatataataattatgcaacatattatgccgattcagtgaaagacaggttcaccatctccagagatgattcaaaaaacactgcctatctacaaatgaacaacttgaaaactgaggacactgccgtgtactactgtgtgagacatgggaacttcggtaatagctacatatcctactgggcttactggggccaagggactctggtcaccgtctcctcaggtggtggtggttctggcggcggcggctccggtggtggtggttctcagactgttgtgactcaggaaccttcactcaccgtatcacctggtggaacagtcacactcacttgtggctcctcgactggggctgttacatctggcaactacccaaactgggtccaacaaaaaccaggtcaggcaccccgtggtctaataggtgggactaagttcctcgcccccggtactcctgccagattctcaggctccctgcttggaggcaaggctgccctcaccctctcaggggtacagccagaggatgaggcagaatattactgtgttctatggtacagcaaccgctgggtgttcggtggaggaaccaaactgactgtccta

SEQ ID NO: 907 - protein, 11 aa, synthetic construct
  REGION 1..11: note = ENSI L-CDR1
RASQNVGTAVA

SEQ ID NO: 908 - protein, 7 aa, synthetic construct
  REGION 1..7: note = ENSI L-CDR2
SASNRYT

SEQ ID NO: 909 - protein, 10 aa, synthetic construct
  REGION 1..10: note = ENSI L-CDR3
QQYTNYPMYT

SEQ ID NO: 910 - protein, 5 aa, synthetic construct
  REGION 1..5: note = ENSI H-CDR1
DYVIH

SEQ ID NO: 911 - protein, 17 aa, synthetic construct
  REGION 1..17: note = ENSI H-CDR2
YINPYDDDTTYNQKFKG

SEQ ID NO: 912 - protein, 15 aa, synthetic construct
  REGION 1..15: note = ENSI H-CDR3
RGNSYDGYFDYSMDY

SEQ ID NO: 913 - DNA, 2298 bp, synthetic construct
  misc_feature 1..2298: note = Human endosialin
  source 1..2298: mol_type = other DNA
atgctgctgcgcctgttgctggcctgggcggccgcagggcccacactgggccaggacccctgggctgctgagccccgtgccgcctgcggccccagcagctgctacgctctcttcccacggcgccgcaccttcctggaggcctggcgggcctgccgcgagctggggggcgacctggccactcctcggacccccgaggaggcccagcgtgtggacagcctggtgggtgcgggcccagccagccggctgctgtggatcgggctgcagcggcaggcccggcaatgccagctgcagcgcccactgcgcggcttcacgtggaccacaggggaccaggacacggctttcaccaactgggcccagccagcctctggaggcccctgcccggcccagcgctgtgtggccctggaggcaagtggcgagcaccgctggctggagggctcgtgcacgctggctgtcgacggctacctgtgccagtttggcttcgagggcgcctgcccggcgctgcaagatgaggcgggccaggccggcccagccgtgtataccacgcccttccacctggtctccacagagtttgagtggctgcccttcggctctgtggccgctgtgcagtgccaggctggcaggggagcctctctgctctgcgtgaagcagcctgagggaggtgtgggctggtcacgggctgggcccctgtgcctggggactggctgcagccctgacaacgggggctgcgaacacgaatgtgtggaggaggtggatggtcacgtgtcctgccgctgcactgagggcttccggctggcagcagacgggcgcagttgcgaggacccctgtgcccaggctccgtgcgagcagcagtgtgagcccggtgggccacaaggctacagctgccactgtcgcctgggtttccggccagcggaggatgatccgcaccgctgtgtggacacagatgagtgccagattgccggtgtgtgccagcagatgtgtgtcaactacgttggtggcttcgagtgttattgtagcgagggacatgagctggaggctgatggcatcagctgcagccctgcaggggccatgggtgcccaggcttcccaggacctcggagatgagttgctggatgacggggaggatgaggaagatgaagacgaggcctggaaggccttcaacggtggctggacggagatgcctgggatcctgtggatggagcctacgcagccgcctgactttgccctggcctatagaccgagcttcccagaggacagagagccacagataccctacccggagcccacctggccacccccgctcagtgcccccagggtcccctaccactcctcagtgctctccgtcacccggcctgtggtggtctctgccacgcatcccacactgccttctgcccaccagcctcctgtgatccctgccacacacccagctttgtcccgtgaccaccagatccccgtgatcgcagccaactatccagatctgccttctgcctaccaacccggtattctctctgtctctcattcagcacagcctcctgcccaccagccccctatgatctcaaccaaatatccggagctcttccctgcccaccagtcccccatgtttccagacacccgggtcgctggcacccagaccaccactcatttgcctggaatcccacctaaccatgcccctctggtcaccaccctcggtgcccagctaccccctcaagccccagatgcccttgtcctcagaacccaggccacccagcttcccattatcccaactgcccagccctctctgaccaccacctccaggtcccctgtgtctcctgcccatcaaatctctgtgcctgctgccacccagcccgcagccctccccaccctcctgccctctcagagccccactaaccagacctcacccatcagccctacacatccccattccaaagccccccaaatcccaagggaagatggccccagtcccaagttggccctgtggctgccctcaccagctcccacagcagccccaacagccctgggggaggctggtcttgccgagcacagccagagggatgaccggtggctgctggtggcactcctggtgccaacgtgtgtctttttggtggtcctgcttgcactgggcatcgtgtactgcacccgctgtggcccccatgcacccaacaagcgcatcactgactgctatcgctgggtcatccatgctgggagcaagagcccaacagaacccatgccccccaggggcagcctcacaggggtgcagacctgcagaaccagcgtggactacaaagatgatgacgataagtga

SEQ ID NO: 914 - protein, 765 aa, synthetic construct
  REGION 1..765: note = Human endosialin
MLLRLLLAWAAAGPTLGQDPWAAEPRAACGPSSCYALFPRRRTFLEAWRACRELGGDLATPRTPEEAQRVDSLVGAGPASRLLWIGLQRQARQCQLQRPLRGFTWTTGDQDTAFTNWAQPASGGPCPAQRCVALEASGEHRWLEGSCTLAVDGYLCQFGFEGACPALQDEAGQAGPAVYTTPFHLVSTEFEWLPFGSVAAVQCQAGRGASLLCVKQPEGGVGWSRAGPLCLGTGCSPDNGGCEHECVEEVDGHVSCRCTEGFRLAADGRSCEDPCAQAPCEQQCEPGGPQGYSCHCRLGFRPAEDDPHRCVDTDECQIAGVCQQMCVNYVGGFECYCSEGHELEADGISCSPAGAMGAQASQDLGDELLDDGEDEEDEDEAWKAFNGGWTEMPGILWMEPTQPPDFALAYRPSFPEDREPQIPYPEPTWPPPLSAPRVPYHSSVLSVTRPVVVSATHPTLPSAHQPPVIPATHPALSRDHQIPVIAANYPDLPSAYQPGILSVSHSAQPPAHQPPMISTKYPELFPAHQSPMFPDTRVAGTQTTTHLPGIPPNHAPLVTTLGAQLPPQAPDALVLRTQATQLPIIPTAQPSLTTTSRSPVSPAHQISVPAATQPAALPTLLPSQSPTNQTSPISPTHPHSKAPQIPREDGPSPKLALWLPSPAPTAAPTALGEAGLAEHSQRDDRWLLVALLVPTCVFLVVLLALGIVYCTRCGPHAPNKRITDCYRWVIHAGSKSPTEPMPPRGSLTGVQTCRTSVDYKDDDDK

SEQ ID NO: 915 - DNA, 2298 bp, synthetic construct
  misc_feature 1..2298: note = Macaque endosialin
  source 1..2298: mol_type = other DNA
atgctgctgcgcctgttgctggcctgggcggccgcagggcccacactgggccaggacccctgggctgctgagccccgctccgcctgcggccccagcagctgctacgctctctttccacggcgccgcacctttctggaggcctggcgggcctgccgcgagctggggggcgacctggccactcctcggacccccgaggaggcccagcgtgtggacaacctggtgggtgcaggcccggccagccggctgctgtggatcggcctgcagcggcaggcccggcaatgccagctgcagcgcccactgcgaggcttcacgtggaccacaggggaccaggacacggctttcaccaactgggcccagccagccactggaggcccctgcccggcccagcgctgtgtggccctggaggcgagtggcgagcaccgctggctggagggctcatgcacgctggctgtcgacggctacttgtgccagtttggcttcgagggtgcctgcccagcgctgcaagacgaagcgggccaggccggcccagccgtctataccacgcccttccacctggtctccacagagtttgagtggctacccttcggctctgtggccgctgtgcagtgccaggctggcaggggagcctctctgctctgcgtgaagcagcccgagggaggtgtgggctggtcacgggcagggcccctgtgcctgggggctggctgcagccctgacaacgggggctgcgaacacgaatgtgtggaggaggtggatggtcacgtgtcctgccgctgcactgagggcttccggctggcagcagacgggcgcagttgcgaggatccctgtgcccaggctccatgcgagcagcagtgtgagcccggtgggccacaaggctacagctgccactgtcgcctgggtttccgacctgcagaggatgatccgcaccgctgtgtggacacagatgagtgccagattgccggtgtgtgccagcagatgtgtgtcaactacgttggtggcttcgagtgttattgtagtgagggtcatgagctggaggctgatggcatcagctgcagccctgcaggggccatgggtgcccgggcttcccaggacctcggagatgagttgctggatgatggggaggatgaggaagatgaagacgaggcctgggaggcctttggcggtggctggacggagatgcctgggatcctgtggatggagcctactcagccgcctgactttgccctggcctatagaccgagcttcccagaggacagagagccacagataccctacccggagcccacctggccgcccccgctcagtgcccccagggtcccctaccactcctcagtgctctccgtcacccggcctgtggtggtctctgccacgcgccccacactgccttccgcccaccagcctcctgtgatccctgccacacacccagctttgtcccgtgaccaccagatccccgtgatcgcagccaactatccagatctgccttctgcctaccaacccggtattctctctgtctctcatccagcacagccccctgcccaccagccccccatgatctcaaccagatatcctgagctgttccctgcccaccagtcccccatgtttccagacacccaggtcgctggcacccagaccaccactcatttgcctgcaatcccacctaaccgtgcccctctggtcaccacactcggtgcccatcaaccccctcaagccccagatgcccctgtcctcagaacccaggctacccagcttcccattatccctactgcccagccgtctctgaccaccagctccaggtcccctgtgtctcctgcccatcaagtctctgtgcctgctgccacccagcccccagccctccccaccctcctgccctctcagagccccactaaccagacctcacccatcagccctacacatccccattccaaagtcccccaaatcccaagggaagatggccccagtcccaagctggccctgtggctgccctcagcagctcccacagcagccccaacagccctgggggaggctagtcttgccgagcacatccagagggatgaccggtggcttctggtggcactcctcgtgccaacgtgtgtctttttggtggtcctgcttgcactgggcattgtgtactgcacccgctgtggcccccatgcacccaacaagcgcatcactgactgctatcgctgggtcacccatgctgggagcaagagtccaacagaacccatgccccccaggggcagcctcacaggggtgcagacctgcagaaccagcgtggactacaaagatgatgacgataagtga

SEQ ID NO: 916 - protein, 765 aa, synthetic construct
  REGION 1..765: note = Macaque endosialin
MLLRLLLAWAAAGPTLGQDPWAAEPRSACGPSSCYALFPRRRTFLEAWRACRELGGDLATPRTPEEAQRVDNLVGAGPASRLLWIGLQRQARQCQLQRPLRGFTWTTGDQDTAFTNWAQPATGGPCPAQRCVALEASGEHRWLEGSCTLAVDGYLCQFGFEGACPALQDEAGQAGPAVYTTPFHLVSTEFEWLPFGSVAAVQCQAGRGASLLCVKQPEGGVGWSRAGPLCLGAGCSPDNGGCEHECVEEVDGHVSCRCTEGFRLAADGRSCEDPCAQAPCEQQCEPGGPQGYSCHCRLGFRPAEDDPHRCVDTDECQIAGVCQQMCVNYVGGFECYCSEGHELEADGISCSPAGAMGARASQDLGDELLDDGEDEEDEDEAWEAFGGGWTEMPGILWMEPTQPPDFALAYRPSFPEDREPQIPYPEPTWPPPLSAPRVPYHSSVLSVTRPVVVSATRPTLPSAHQPPVIPATHPALSRDHQIPVIAANYPDLPSAYQPGILSVSHPAQPPAHQPPMISTRYPELFPAHQSPMFPDTQVAGTQTTTHLPAIPPNRAPLVTTLGAHQPPQAPDAPVLRTQATQLPIIPTAQPSLTTSSRSPVSPAHQVSVPAATQPPALPTLLPSQSPTNQTSPISPTHPHSKVPQIPREDGPSPKLALWLPSAAPTAAPTALGEASLAEHIQRDDRWLLVALLVPTCVFLVVLLALGIVYCTRCGPHAPNKRITDCYRWVTHAGSKSPTEPMPPRGSLTGVQTCRTSVDYKDDDDK

SEQ ID NO: 917 - DNA, 40 bp, synthetic construct
  misc_feature 1..40: note = Forward primer
  source 1..40: mol_type = other DNA
atatgaattcgccaccatgctgctgcgcctgttgctggcc

SEQ ID NO: 918 - DNA, 24 bp, synthetic construct
  misc_feature 1..24: note = Reverse primer
  source 1..24: mol_type = other DNA
gtcttcatcttcctcatcctcccc

SEQ ID NO: 919 - DNA, 26 bp, synthetic construct
  misc_feature 1..26: note = Forward primer
  source 1..26: mol_type = other DNA
gtcaactacgttggtggcttcgagtg

SEQ ID NO: 920 - DNA, 57 bp, synthetic construct
  misc_feature 1..57: note = Reverse primer
  source 1..57: mol_type = other DNA
ggtctagatcacttatcgtcatcatctttgtagtccacgctggttctgcaggtctgc

SEQ ID NO: 921 - DNA, 84 bp, synthetic construct
  misc_feature 1..84: note = Primer 5'ED-VH-A-XhoI
  source 1..84: mol_type = other DNA
ccagctctcgagtcaggasctgagstgrwgaagcctggggcttcagtgaagrtgtcctgcaaggcttctggatacacattcact

SEQ ID NO: 922 - DNA, 81 bp, synthetic construct
  misc_feature 1..81: note = Primer 3'ED-VH-B
  source 1..81: mol_type = other DNA
aatatatccmatccactcaaggckctktccakktsyctgcytcayccagtgtataacatagtcagtgaatgtgtatccaga

SEQ ID NO: 923 - DNA, 66 bp, synthetic construct
  misc_feature 1..66: note = Primer 5'ED-VH-C
  source 1..66: mol_type = other DNA
cttgagtggatkggatatattaatccttatgatgatgatactacctacaaccagaagttcaagggc

SEQ ID NO: 924 - DNA, 70 bp, synthetic construct
  misc_feature 1..70: note = Primer 3'ED-VH-D
  source 1..70: mol_type = other DNA
tgagctscatgtaggctgtgytggmggatktgwctmsagtmawtgtgrccyggcccttgaacttctggtt

SEQ ID NO: 925 - DNA, 70 bp, synthetic construct
  misc_feature 1..70: note = Primer 5'ED-VH-E
  source 1..70: mol_type = other DNA
cacagcctacatgsaactcarcagcctgasatctgaggacactgcagtctattactgtgcaagaaggggg

SEQ ID NO: 926 - DNA, 87 bp, synthetic construct
  misc_feature 1..87: note = Primer 3'ED-VH-F-BstEII
  source 1..87: mol_type = other DNA
cctgatggtgaccaaggttccttgaccccagtagtccatagaatagtcgaagtaaccatcataggagttcccccttcttgcacagta

SEQ ID NO: 927 - DNA, 83 bp, synthetic construct
  misc_feature 1..83: note = Primer 5'ED-VL-A-SacI
  misc_feature 64..65: note = n is a, c, g, or t
  source 1..83: mol_type = other DNA
ccagtcgagctccagctgacccagtctcmaarmttcmtgtccrcatcagtaggagacagagtcnnsatcacctgcagggccag

SEQ ID NO: 928 - DNA, 63 bp, synthetic construct
  misc_feature 1..63: note = Primer 3'ED-VL-B
  source 1..63: mol_type = other DNA
tcctggtttctgttgataccaggctacagcagtacccacattctgactggccctgcaggtgat

SEQ ID NO: 929 - DNA, 72 bp, synthetic construct
  misc_feature 1..72: note = Primer 5'ED-VL-C
  source 1..72: mol_type = other DNA
tatcaacagaaaccaggamaakcccctaaattactgatttactcggcatcgaatcggtacactggagtccct

SEQ ID NO: 930 - DNA, 69 bp, synthetic construct
  misc_feature 1..69: note = Primer 3'ED-VL-D
  source 1..69: mol_type = other DNA
gctgatggtgagagtgaamtctgtcccagatccactgcctgagaagcgayyagggactccagtgtaccg

SEQ ID NO: 931 - DNA, 69 bp, synthetic construct
  misc_feature 1..69: note = Primer 5'ED-VL-E
  source 1..69: mol_type = other DNA
ttcactctcaccatcagcartmtgcagyctgaagacytsgcarmttattwctgccagcaatataccaac

SEQ ID NO: 932 - DNA, 81 bp, synthetic construct
  misc_feature 1..81: note = Primer 3'ED-VL-F-BsiWI/SpeI
  source 1..81: mol_type = other DNA
cctgatactagtcgtacgttttatttccagcttggtcccctgtccaaacgtatacatgggatagttggtatattgctggca

SEQ ID NO: 933 - skipped

SEQ ID NO: 934 - protein, 113 aa, synthetic construct
  REGION 1..113: note = Ep 5-10 VL
ELVMTQSPSSLTVTAGEKVTMSCKSSQSLLNSGNQKNYLTWYQQKPGQPPKLLIYWASTRESGVPDRFTGSGSGTDFTLTISSVQAEDLAVYYCQNDYSYPLTFGAGTKLEIK

SEQ ID NO: 935 - protein, 17 aa, synthetic construct
  REGION 1..17: note = Ep 5-10 LCDR1
KSSQSLLNSGNQKNYLT

SEQ ID NO: 936 - protein, 7 aa, synthetic construct
  REGION 1..7: note = Ep 5-10 LCDR2
WASTRES

SEQ ID NO: 937 - protein, 9 aa, synthetic construct
  REGION 1..9: note = Ep 5-10 LCDR3
QNDYSYPLT

SEQ ID NO: 938 - DNA, 339 bp, synthetic construct
  misc_feature 1..339: note = Ep 5-10 VL
  source 1..339: mol_type = other DNA
gagctcgtgatgacacagtctccatcctccctgactgtgacagcaggagagaaggtcactatgagctgcaagtccagtcagagtctgttaaacagtggaaatcaaaagaactacttgacctggtaccagcagaaaccagggcagcctcctaaactgttgatctactgggcatccactagggaatctggggtccctgatcgcttcacaggcagtggatctggaacagatttcactctcaccatcagcagtgtgcaggctgaagacctggcagtttattactgtcagaatgattatagttatccgctcacgttcggtgctgggaccaagcttgagatcaaa

SEQ ID NO: 939 - protein, 120 aa, synthetic construct
  REGION 1..120: note = Ep 5-10 HL
EVQLLEQSGAELVRPGTSVKISCKASGYAFTNYWLGWVKQRPGHGLEWIGDIFPGSGNIHYNEKFKGKATLTADKSSSTAYMQLSSLTFEDSAVYFCARLRNWDEPMDYWGQGTTVTVSS

SEQ ID NO: 940 - protein, 5 aa, synthetic construct
  REGION 1..5: note = Ep 5-10 HCDR1
NYWLG

SEQ ID NO: 941 - protein, 17 aa, synthetic construct
  REGION 1..17: note = Ep 5-10 HCDR2
DIFPGSGNIHYNEKFKG

SEQ ID NO: 942 - protein, 10 aa, synthetic construct
  REGION 1..10: note = Ep 5-10 HCDR3
LRNWDEPMDY

SEQ ID NO: 943 - DNA, 360 bp, synthetic construct
  misc_feature 1..360: note = Ep 5-10 HL
  source 1..360: mol_type = other DNA
gaggtgcagctgctcgagcagtctggagctgagctggtaaggcctgggacttcagtgaagatatcctgcaaggcttctggatacgccttcactaactactggctaggttgggtaaagcagaggcctggacatggacttgagtggattggagatattttccctggaagtggtaatatccactacaatgagaagttcaagggcaaagccacactgactgcagacaaatcttcgagcacagcctatatgcagctcagtagcctgacatttgaggactctgctgtctatttctgtgcaagactgaggaactgggacgagcctatggactactggggccaagggaccacggtcaccgtctcctcc

SEQ ID NO: 944 - protein, 502 aa, synthetic construct
  REGION 1..502: note = Ep 5-10 LH x I2C HL
ELVMTQSPSSLTVTAGEKVTMSCKSSQSLLNSGNQKNYLTWYQQKPGQPPKLLIYWASTRESGVPDRFTGSGSGTDFTLTISSVQAEDLAVYYCQNDYSYPLTFGAGTKLEIKGGGGSGGGGSGGGGSEVQLLEQSGAELVRPGTSVKISCKASGYAFTNYWLGWVKQRPGHGLEWIGDIFPGSGNIHYNEKFKGKATLTADKSSSTAYMQLSSLTFEDSAVYFCARLRNWDEPMDYWGQGTTVTVSSGGGGSEVQLVESGGGLVQPGGSLKLSCAASGFTFNKYAMNWVRQAPGKGLEWVARIRSKYNNYATYYADSVKDRFTISRDDSKNTAYLQMNNLKTEDTAVYYCVRHGNFGNSYISYWAYWGQGTLVTVSSGGGGSGGGGSGGGGSQTVVTQEPSLTVSPGGTVTLTCGSSTGAVTSGNYPNWVQQKPGQAPRGLIGGTKFLAPGTPARFSGSLLGGKAALTLSGVQPEDEAEYYCVLWYSNRWVFGGGTKLTVL

SEQ ID NO: 945 - DNA, 1506 bp, synthetic construct
  misc_feature 1..1506: note = Ep 5-10 LH x I2C HL
  source 1..1506: mol_type = other DNA
gagctcgtgatgacacagtctccatcctccctgactgtgacagcaggagagaaggtcactatgagctgcaagtccagtcagagtctgttaaacagtggaaatcaaaagaactacttgacctggtaccagcagaaaccagggcagcctcctaaactgttgatctactgggcatccactagggaatctggggtccctgatcgcttcacaggcagtggatctggaacagatttcactctcaccatcagcagtgtgcaggctgaagacctggcagtttattactgtcagaatgattatagttatccgctcacgttcggtgctgggaccaagcttgagatcaaaggtggtggtggttctggcggcggcggctccggtggtggtggttctgaggtgcagctgctcgagcagtctggagctgagctggtaaggcctgggacttcagtgaagatatcctgcaaggcttctggatacgccttcactaactactggctaggttgggtaaagcagaggcctggacatggacttgagtggattggagatattttccctggaagtggtaatatccactacaatgagaagttcaagggcaaagccacactgactgcagacaaatcttcgagcacagcctatatgcagctcagtagcctgacatttgaggactctgctgtctatttctgtgcaagactgaggaactgggacgagcctatggactactggggccaagggaccacggtcaccgtctcctccggaggtggtggatccgaggtgcagctggtcgagtctggaggaggattggtgcagcctggagggtcattgaaactctcatgtgcagcctctggattcaccttcaataagtacgccatgaactgggtccgccaggctccaggaaagggtttggaatgggttgctcgcataagaagtaaatataataattatgcaacatattatgccgattcagtgaaagacaggttcaccatctccagagatgattcaaaaaacactgcctatctacaaatgaacaacttgaaaactgaggacactgccgtgtactactgtgtgagacatgggaacttcggtaatagctacatatcctactgggcttactggggccaagggactctggtcaccgtctcctcaggtggtggtggttctggcggcggcggctccggtggtggtggttctcagactgttgtgactcaggaaccttcactcaccgtatcacctggtggaacagtcacactcacttgtggctcctcgactggggctgttacatctggcaactacccaaactgggtccaacaaaaaccaggtcaggcaccccgtggtctaataggtgggactaagttcctcgcccccggtactcctgccagattctcaggctccctgcttggaggcaaggctgccctcaccctctcaggggtacagccagaggatgaggcagaatattactgtgttctatggtacagcaaccgctgggtgttcggtggaggaaccaaactgactgtccta

SEQ ID NO: 946 - protein, 502 aa, synthetic construct
  REGION 1..502: note = Ep 5-10 LH x H2C HL
ELVMTQSPSSLTVTAGEKVTMSCKSSQSLLNSGNQKNYLTWYQQKPGQPPKLLIYWASTRESGVPDRFTGSGSGTDFTLTISSVQAEDLAVYYCQNDYSYPLTFGAGTKLEIKGGGGSGGGGSGGGGSEVQLLEQSGAELVRPGTSVKISCKASGYAFTNYWLGWVKQRPGHGLEWIGDIFPGSGNIHYNEKFKGKATLTADKSSSTAYMQLSSLTFEDSAVYFCARLRNWDEPMDYWGQGTTVTVSSGGGGSEVQLVESGGGLVQPGGSLKLSCAASGFTFNKYAMNWVRQAPGKGLEWVARIRSKYNNYATYYADSVKDRFTISRDDSKNTAYLQMNNLKTEDTAVYYCVRHGNFGNSYISYWAYWGQGTLVTVSSGGGGSGGGGSGGGGSQTVVTQEPSLTVSPGGTVTLTCGSSTGAVTSGYYPNWVQQKPGQAPRGLIGGTKFLAPGTPARFSGSLLGGKAALTLSGVQPEDEAEYYCALWYSNRWVFGGGTKLTVL

SEQ ID NO: 947 - DNA, 1506 bp, synthetic construct
  misc_feature 1..1506: note = Ep 5-10 LH x H2C HL
  source 1..1506: mol_type = other DNA
gagctcgtgatgacacagtctccatcctccctgactgtgacagcaggagagaaggtcactatgagctgcaagtccagtcagagtctgttaaacagtggaaatcaaaagaactacttgacctggtaccagcagaaaccagggcagcctcctaaactgttgatctactgggcatccactagggaatctggggtccctgatcgcttcacaggcagtggatctggaacagatttcactctcaccatcagcagtgtgcaggctgaagacctggcagtttattactgtcagaatgattatagttatccgctcacgttcggtgctgggaccaagcttgagatcaaaggtggtggtggttctggcggcggcggctccggtggtggtggttctgaggtgcagctgctcgagcagtctggagctgagctggtaaggcctgggacttcagtgaagatatcctgcaaggcttctggatacgccttcactaactactggctaggttgggtaaagcagaggcctggacatggacttgagtggattggagatattttccctggaagtggtaatatccactacaatgagaagttcaagggcaaagccacactgactgcagacaaatcttcgagcacagcctatatgcagctcagtagcctgacatttgaggactctgctgtctatttctgtgcaagactgaggaactgggacgagcctatggactactggggccaagggaccacggtcaccgtctcctccggaggtggtggatccgaggtgcagctggtcgagtctggaggaggattggtgcagcctggagggtcattgaaactctcatgtgcagcctctggattcaccttcaataagtacgccatgaactgggtccgccaggctccaggaaagggtttggaatgggttgctcgcataagaagtaaatataataattatgcaacatattatgccgattcagtgaaagacaggttcaccatctccagagatgattcaaaaaacactgcctatctacaaatgaacaacttgaaaactgaggacactgccgtgtactactgtgtgagacatgggaacttcggtaatagctacatatcctactgggcttactggggccaagggactctggtcaccgtctcctcaggtggtggtggttctggcggcggcggctccggtggtggtggttctcagactgttgtgactcaggaaccttcactcaccgtatcacctggtggaacagtcacactcacttgtggctcctcgactggggctgttacatctggctactacccaaactgggtccaacaaaaaccaggtcaggcaccccgtggtctaataggtgggactaagttcctcgcccccggtactcctgccagattctcaggctccctgcttggaggcaaggctgccctcaccctctcaggggtacagccagaggatgaggcagaatattactgtgctctatggtacagcaaccgctgggtgttcggtggaggaaccaaactgactgtccta

SEQ ID NO: 948 - protein, 502 aa, synthetic construct
  REGION 1..502: note = Ep 5-10 LH x F12Q HL
ELVMTQSPSSLTVTAGEKVTMSCKSSQSLLNSGNQKNYLTWYQQKPGQPPKLLIYWASTRESGVPDRFTGSGSGTDFTLTISSVQAEDLAVYYCQNDYSYPLTFGAGTKLEIKGGGGSGGGGSGGGGSEVQLLEQSGAELVRPGTSVKISCKASGYAFTNYWLGWVKQRPGHGLEWIGDIFPGSGNIHYNEKFKGKATLTADKSSSTAYMQLSSLTFEDSAVYFCARLRNWDEPMDYWGQGTTVTVSSGGGGSEVQLVESGGGLVQPGGSLKLSCAASGFTFNSYAMNWVRQAPGKGLEWVARIRSKYNNYATYYADSVKGRFTISRDDSKNTAYLQMNNLKTEDTAVYYCVRHGNFGNSYVSWWAYWGQGTLVTVSSGGGGSGGGGSGGGGSQTVVTQEPSLTVSPGGTVTLTCGSSTGAVTSGNYPNWVQQKPGQAPRGLIGGTKFLAPGTPARFSGSLLGGKAALTLSGVQPEDEAEYYCVLWYSNRWVFGGGTKLTVL

SEQ ID NO: 949 - DNA, 1506 bp, synthetic construct
  misc_feature 1..1506: note = Ep 5-10 LH x F12Q HL
  source 1..1506: mol_type = other DNA
gagctcgtgatgacacagtctccatcctccctgactgtgacagcaggagagaaggtcactatgagctgcaagtccagtcagagtctgttaaacagtggaaatcaaaagaactacttgacctggtaccagcagaaaccagggcagcctcctaaactgttgatctactgggcatccactagggaatctggggtccctgatcgcttcacaggcagtggatctggaacagatttcactctcaccatcagcagtgtgcaggctgaagacctggcagtttattactgtcagaatgattatagttatccgctcacgttcggtgctgggaccaagcttgagatcaaaggtggtggtggttctggcggcggcggctccggtggtggtggttctgaggtgcagctgctcgagcagtctggagctgagctggtaaggcctgggacttcagtgaagatatcctgcaaggcttctggatacgccttcactaactactggctaggttgggtaaagcagaggcctggacatggacttgagtggattggagatattttccctggaagtggtaatatccactacaatgagaagttcaagggcaaagccacactgactgcagacaaatcttcgagcacagcctatatgcagctcagtagcctgacatttgaggactctgctgtctatttctgtgcaagactgaggaactgggacgagcctatggactactggggccaagggaccacggtcaccgtctcctccggaggtggtggatccgaggtgcagctggtcgagtctggaggaggattggtgcagcctggagggtcattgaaactctcatgtgcagcctctggattcaccttcaatagctacgccatgaactgggtccgccaggctccaggaaagggtttggaatgggttgctcgcataagaagtaaatataataattatgcaacatattatgccgattcagtgaaaggcaggttcaccatctccagagatgattcaaaaaacactgcctatctacaaatgaacaacttgaaaactgaggacactgccgtgtactactgtgtgagacatgggaacttcggtaatagctacgtttcctggtgggcttactggggccaagggactctggtcaccgtctcctcaggtggtggtggttctggcggcggcggctccggtggtggtggttctcagactgttgtgactcaggaaccttcactcaccgtatcacctggtggaacagtcacactcacttgtggctcctcgactggggctgttacatctggcaactacccaaactgggtccaacaaaaaccaggtcaggcaccccgtggtctaataggtgggactaagttcctcgcccccggtactcctgccagattctcaggctccctgcttggaggcaaggctgccctcaccctctcaggggtacagccagaggatgaggcagaatattactgtgttctatggtacagcaaccgctgggtgttcggtggaggaaccaaactgactgtccta

SEQ ID NO: 950 - protein, 113 aa, synthetic construct
  REGION 1..113: note = hEp 14-A1 L
DIVMTQTPLSLPVTPGEPVSISCKSSQSLLNSGNQKNYLTWYLQKPGQSPQLLIYWASTRESGVPDRFSGSGSGTDFTLTISSVQAEDVGVYYCQNDYSYPLTFGQGTKLEIK

SEQ ID NO: 951 - protein, 17 aa, synthetic construct
  REGION 1..17: note = hEp 14-A1 LCDR1
KSSQSLLNSGNQKNYLT

SEQ ID NO: 952 - protein, 7 aa, synthetic construct
  REGION 1..7: note = hEp 14-A1 LCDR2
WASTRES

SEQ ID NO: 953 - protein, 9 aa, synthetic construct
  REGION 1..9: note = hEp 14-A1 LCDR3
QNDYSYPLT

SEQ ID NO: 954 - DNA, 339 bp, synthetic construct
  misc_feature 1..339: note = hEp 14-A1 L
  source 1..339: mol_type = other DNA
gacatcgtgatgacacagactccactctccctgcctgtgacaccaggagagccggtctctatcagctgcaagtccagtcagagtctgttaaacagtggaaatcaaaagaactacttgacctggtacctgcagaaaccagggcagtctcctcaactgttgatctactgggcatccactagggaatctggggtccctgatcgcttctcaggcagtggatctggaacagatttcactctcacaatcagcagtgtgcaggctgaagacgtgggagtttattactgtcagaatgattatagttatccgctcacgttcggtcaagggaccaagcttgagatcaaa

SEQ ID NO: 955 - protein, 119 aa, synthetic construct
  REGION 1..119: note = hEp 14-A1 H
QVQLVQSGAEVKKPGSSVKISCKASGYTFSNYWLGWVRQAPGQGLEWIGDIFPGSGNIHYNEKFKGRVTITADKSTSTAYMELSSLTSEDTAVYYCARLRNWDEPMDYWGQGTTVTVSS

SEQ ID NO: 956 - protein, 5 aa, synthetic construct
  REGION 1..5: note = hEp 14-A1 HCDR1
NYWLG

SEQ ID NO: 957 - protein, 17 aa, synthetic construct
  REGION 1..17: note = hEp 14-A1 HCDR2
DIFPGSGNIHYNEKFKG

SEQ ID NO: 958 - protein, 10 aa, synthetic construct
  REGION 1..10: note = hEp 14-A1 HCDR3
LRNWDEPMDY

SEQ ID NO: 959 - DNA, 357 bp, synthetic construct
  misc_feature 1..357: note = hEp 14-A1 H
  source 1..357: mol_type = other DNA
caggtgcagctggtccagtctggagctgaggtgaaaaagcctgggtcttcagtgaagatatcctgcaaggcttctggatacaccttctctaactactggctaggttgggtaaggcaggcgcctggacagggacttgagtggattggagatattttccctggaagtggtaatatccactacaatgagaagttcaagggcagagtcacaatcactgcagacaaatctacgagcacagcctatatggaactcagtagcctgacatctgaggacactgctgtctattactgtgcaagactgaggaactgggacgagcctatggactactggggccaagggaccacggtcaccgtctcctcc

SEQ ID NO: 960 - protein, 501 aa, synthetic construct
  REGION 1..501: note = hEp 14-A1 LH x I2C HL
DIVMTQTPLSLPVTPGEPVSISCKSSQSLLNSGNQKNYLTWYLQKPGQSPQLLIYWASTRESGVPDRFSGSGSGTDFTLTISSVQAEDVGVYYCQNDYSYPLTFGQGTKLEIKGGGGSGGGGSGGGGSQVQLVQSGAEVKKPGSSVKISCKASGYTFSNYWLGWVRQAPGQGLEWIGDIFPGSGNIHYNEKFKGRVTITADKSTSTAYMELSSLTSEDTAVYYCARLRNWDEPMDYWGQGTTVTVSSGGGGSEVQLVESGGGLVQPGGSLKLSCAASGFTFNKYAMNWVRQAPGKGLEWVARIRSKYNNYATYYADSVKDRFTISRDDSKNTAYLQMNNLKTEDTAVYYCVRHGNFGNSYISYWAYWGQGTLVTVSSGGGGSGGGGSGGGGSQTVVTQEPSLTVSPGGTVTLTCGSSTGAVTSGNYPNWVQQKPGQAPRGLIGGTKFLAPGTPARFSGSLLGGKAALTLSGVQPEDEAEYYCVLWYSNRWVFGGGTKLTVL

SEQ ID NO: 961 - DNA, 1503 bp, synthetic construct
  misc_feature 1..1503: note = hEp 14-A1 LH x I2C HL
  source 1..1503: mol_type = other DNA
gacatcgtgatgacacagactccactctccctgcctgtgacaccaggagagccggtctctatcagctgcaagtccagtcagagtctgttaaacagtggaaatcaaaagaactacttgacctggtacctgcagaaaccagggcagtctcctcaactgttgatctactgggcatccactagggaatctggggtccctgatcgcttctcaggcagtggatctggaacagatttcactctcacaatcagcagtgtgcaggctgaagacgtgggagtttattactgtcagaatgattatagttatccgctcacgttcggtcaagggaccaagcttgagatcaaaggtggtggtggttctggcggcggcggctccggtggtggtggttctcaggtgcagctggtccagtctggagctgaggtgaaaaagcctgggtcttcagtgaagatatcctgcaaggcttctggatacaccttctctaactactggctaggttgggtaaggcaggcgcctggacagggacttgagtggattggagatattttccctggaagtggtaatatccactacaatgagaagttcaagggcagagtcacaatcactgcagacaaatctacgagcacagcctatatggaactcagtagcctgacatctgaggacactgctgtctattactgtgcaagactgaggaactgggacgagcctatggactactggggccaagggaccacggtcaccgtctcctccggaggtggtggatccgaggtgcagctggtcgagtctggaggaggattggtgcagcctggagggtcattgaaactctcatgtgcagcctctggattcaccttcaataagtacgccatgaactgggtccgccaggctccaggaaagggtttggaatgggttgctcgcataagaagtaaatataataattatgcaacatattatgccgattcagtgaaagacaggttcaccatctccagagatgattcaaaaaacactgcctatctacaaatgaacaacttgaaaactgaggacactgccgtgtactactgtgtgagacatgggaacttcggtaatagctacatatcctactgggcttactggggccaagggactctggtcaccgtctcctcaggtggtggtggttctggcggcggcggctccggtggtggtggttctcagactgttgtgactcaggaaccttcactcaccgtatcacctggtggaacagtcacactcacttgtggctcctcgactggggctgttacatctggcaactacccaaactgggtccaacaaaaaccaggtcaggcaccccgtggtctaataggtgggactaagttcctcgcccccggtactcctgccagattctcaggctccctgcttggaggcaaggctgccctcaccctctcaggggtacagccagaggatgaggcagaatattactgtgttctatggtacagcaaccgctgggtgttcggtggaggaaccaaactgactgtccta

SEQ ID NO: 962 - protein, 113 aa, synthetic construct
  REGION 1..113: note = hEp 14-D2 L
DIVMTQTPLSLPVTPGEQVSISCKSSQSLLNSGNQKNYLTWYQQKPGQSPQLLIYWASTRESGVPDRFSGSGSGTDFTLKISRVEAEDVGVYYCQNDYSYPLTFGQGTKLEIK

SEQ ID NO: 963 - protein, 17 aa, synthetic construct
  REGION 1..17: note = hEp 14-D2 LCDR1
KSSQSLLNSGNQKNYLT

SEQ ID NO: 964 - protein, 7 aa, synthetic construct
  REGION 1..7: note = hEp 14-D2 LCDR2
WASTRES

SEQ ID NO: 965 - protein, 9 aa, synthetic construct
  REGION 1..9: note = hEp 14-D2 LCDR3
QNDYSYPLT

SEQ ID NO: 966 - DNA, 339 bp, synthetic construct
  misc_feature 1..339: note = hEp 14-D2 L
  source 1..339: mol_type = other DNA
gacatcgtgatgacacagactccactctccctgcctgtgacaccaggagagcaggtctctatcagctgcaagtccagtcagagtctgttaaacagtggaaatcaaaagaactacttgacctggtaccagcagaaaccagggcagtctcctcaactgttgatctactgggcatccactagggaatctggggtccctgatcgcttctcaggcagtggatctggaacagatttcactctcaaaatcagccgtgtggaggctgaagacgtgggagtttattactgtcagaatgattatagttatccgctcacgttcggtcaagggaccaagcttgagatcaaa

SEQ ID NO: 967 - protein, 119 aa, synthetic construct
  REGION 1..119: note = hEp 14-D2 H
QVQLVQSGAEVKKPGSSVKVSCKASGYTFSNYWLGWVRQAPGQGLEWMGDIFPGSGNIHYNEKFKGRVTITADKSTSTAYMELSSLTSEDTAVYYCARLRNWDEPMDYWGQGTTVTVSS

SEQ ID NO: 968 - protein, 5 aa, synthetic construct
  REGION 1..5: note = hEp 14-D2 HCDR1
NYWLG

SEQ ID NO: 969 - protein, 17 aa, synthetic construct
  REGION 1..17: note = hEp 14-D2 HCDR2
DIFPGSGNIHYNEKFKG

SEQ ID NO: 970 - protein, 10 aa, synthetic construct
  REGION 1..10: note = hEp 14-D2 HCDR3
LRNWDEPMDY

SEQ ID NO: 971 - DNA, 357 bp, synthetic construct
  misc_feature 1..357: note = hEp 14-D2 H
  source 1..357: mol_type = other DNA
caggtgcagctggtccagtctggagctgaggtgaaaaagcctgggtcttcagtgaaggtatcctgcaaggcttctggatacaccttctctaactactggctaggttgggtaaggcaggcgcctggacagggacttgagtggatgggagatattttccctggaagtggtaatatccactacaatgagaagttcaagggcagagtcacaatcactgcagacaaatctacgagcacagcctatatggaactcagtagcctgacatctgaggacactgctgtctattactgtgcaagactgaggaactgggacgagcctatggactactggggccaagggaccacggtcaccgtctcctcc

SEQ ID NO: 972 - protein, 501 aa, synthetic construct
  REGION 1..501: note = hEp 14-D2 LH x I2C HL
DIVMTQTPLSLPVTPGEQVSISCKSSQSLLNSGNQKNYLTWYQQKPGQSPQLLIYWASTRESGVPDRFSGSGSGTDFTLKISRVEAEDVGVYYCQNDYSYPLTFGQGTKLEIKGGGGSGGGGSGGGGSQVQLVQSGAEVKKPGSSVKVSCKASGYTFSNYWLGWVRQAPGQGLEWMGDIFPGSGNIHYNEKFKGRVTITADKSTSTAYMELSSLTSEDTAVYYCARLRNWDEPMDYWGQGTTVTVSSGGGGSEVQLVESGGGLVQPGGSLKLSCAASGFTFNKYAMNWVRQAPGKGLEWVARIRSKYNNYATYYADSVKDRFTISRDDSKNTAYLQMNNLKTEDTAVYYCVRHGNFGNSYISYWAYWGQGTLVTVSSGGGGSGGGGSGGGGSQTVVTQEPSLTVSPGGTVTLTCGSSTGAVTSGNYPNWVQQKPGQAPRGLIGGTKFLAPGTPARFSGSLLGGKAALTLSGVQPEDEAEYYCVLWYSNRWVFGGGTKLTVL

SEQ ID NO: 973 - DNA, 1503 bp, synthetic construct
  misc_feature 1..1503: note = hEp 14-D2 LH x I2C HL
  source 1..1503: mol_type = other DNA
gacatcgtgatgacacagactccactctccctgcctgtgacaccaggagagcaggtctctatcagctgcaagtccagtcagagtctgttaaacagtggaaatcaaaagaactacttgacctggtaccagcagaaaccagggcagtctcctcaactgttgatctactgggcatccactagggaatctggggtccctgatcgcttctcaggcagtggatctggaacagatttcactctcaaaatcagccgtgtggaggctgaagacgtgggagtttattactgtcagaatgattatagttatccgctcacgttcggtcaagggaccaagcttgagatcaaaggtggtggtggttctggcggcggcggctccggtggtggtggttctcaggtgcagctggtccagtctggagctgaggtgaaaaagcctgggtcttcagtgaaggtatcctgcaaggcttctggatacaccttctctaactactggctaggttgggtaaggcaggcgcctggacagggacttgagtggatgggagatattttccctggaagtggtaatatccactacaatgagaagttcaagggcagagtcacaatcactgcagacaaatctacgagcacagcctatatggaactcagtagcctgacatctgaggacactgctgtctattactgtgcaagactgaggaactgggacgagcctatggactactggggccaagggaccacggtcaccgtctcctccggaggtggtggatccgaggtgcagctggtcgagtctggaggaggattggtgcagcctggagggtcattgaaactctcatgtgcagcctctggattcaccttcaataagtacgccatgaactgggtccgccaggctccaggaaagggtttggaatgggttgctcgcataagaagtaaatataataattatgcaacatattatgccgattcagtgaaagacaggttcaccatctccagagatgattcaaaaaacactgcctatctacaaatgaacaacttgaaaactgaggacactgccgtgtactactgtgtgagacatgggaacttcggtaatagctacatatcctactgggcttactggggccaagggactctggtcaccgtctcctcaggtggtggtggttctggcggcggcggctccggtggtggtggttctcagactgttgtgactcaggaaccttcactcaccgtatcacctggtggaacagtcacactcacttgtggctcctcgactggggctgttacatctggcaactacccaaactgggtccaacaaaaaccaggtcaggcaccccgtggtctaataggtgggactaagttcctcgcccccggtactcctgccagattctcaggctccctgcttggaggcaaggctgccctcaccctctcaggggtacagccagaggatgaggcagaatattactgtgttctatggtacagcaaccgctgggtgttcggtggaggaaccaaactgactgtccta

SEQ ID NO: 974 - protein, 113 aa, synthetic construct
  REGION 1..113: note = hEp 14-H8 L
DIVMTQTPLSLPVTPGEPASISCKSSQSLLNSGNQKNYLTWYQQKPGQSPKLLIYWASTRESGVPDRFSGSGSGTDFTLKISRVEAEDVGVYYCQNDYSYPLTFGQGTKLEIK

SEQ ID NO: 975 - protein, 17 aa, synthetic construct
  REGION 1..17: note = hEp 14-H8 LCDR1
KSSQSLLNSGNQKNYLT

SEQ ID NO: 976 - protein, 7 aa, synthetic construct
  REGION 1..7: note = hEp 14-H8 LCDR2
WASTRES

SEQ ID NO: 977 - protein, 9 aa, synthetic construct
  REGION 1..9: note = hEp 14-H8 LCDR3
QNDYSYPLT

SEQ ID NO: 978 - DNA, 339 bp, synthetic construct
  misc_feature 1..339: note = hEp 14-H8 L
  source 1..339: mol_type = other DNA
gacatcgtgatgacacagactccactctccctgcctgtgacaccaggagagccggcctctatcagctgcaagtccagtcagagtctgttaaacagtggaaatcaaaagaactacttgacctggtaccagcagaaaccagggcagtctcctaaactgttgatctactgggcatccactagggaatctggggtccctgatcgcttctcaggcagtggatctggaacagatttcactctcaaaatcagccgtgtggaggctgaagacgtgggagtttattactgtcagaatgattatagttatccgctcacgttcggtcaagggaccaagcttgagatcaaa

SEQ ID NO: 979 - protein, 119 aa, synthetic construct
  REGION 1..119: note = hEp 14-H8 H
QVQLVQSGAELKKPGSSVKVSCKASGYTFSNYWLGWVRQTPGQGLEWMGDIFPGSGNIHYNEKFKGRVTITADKSTSTAYMELSSLRSEDTAVYYCARLRNWDEPMDYWGQGTTVTVSS

SEQ ID NO: 980 - protein, 5 aa, synthetic construct
  REGION 1..5: note = hEp 14-H8 HCDR1
NYWLG

SEQ ID NO: 981 - protein, 17 aa, synthetic construct
  REGION 1..17: note = hEp 14-H8 HCDR2
DIFPGSGNIHYNEKFKG

SEQ ID NO: 982 - protein, 10 aa, synthetic construct
  REGION 1..10: note = hEp 14-H8 HCDR3
LRNWDEPMDY

SEQ ID NO: 983 - DNA, 357 bp, synthetic construct
  misc_feature 1..357: note = hEp 14-H8 H
  source 1..357: mol_type = other DNA
caggtgcagctggtccagtctggagctgagctgaaaaagcctgggtcttcagtgaaggtatcctgcaaggcttctggatacaccttctctaactactggctaggttgggtaaggcagacgcctggacagggacttgagtggatgggagatattttccctggaagtggtaatatccactacaatgagaagttcaagggcagagtcacaatcactgcagacaaatctacgagcacagcctatatggaactcagtagcctgagatctgaggacactgctgtctattactgtgcaagactgaggaactgggacgagcctatggactactggggccaagggaccacggtcaccgtctcctcc

SEQ ID NO: 984 - protein, 501 aa, synthetic construct
  REGION 1..501: note = hEp 14-H8 LH x I2C HL
DIVMTQTPLSLPVTPGEPASISCKSSQSLLNSGNQKNYLTWYQQKPGQSPKLLIYWASTRESGVPDRFSGSGSGTDFTLKISRVEAEDVGVYYCQNDYSYPLTFGQGTKLEIKGGGGSGGGGSGGGGSQVQLVQSGAELKKPGSSVKVSCKASGYTFSNYWLGWVRQTPGQGLEWMGDIFPGSGNIHYNEKFKGRVTITADKSTSTAYMELSSLRSEDTAVYYCARLRNWDEPMDYWGQGTTVTVSSGGGGSEVQLVESGGGLVQPGGSLKLSCAASGFTFNKYAMNWVRQAPGKGLEWVARIRSKYNNYATYYADSVKDRFTISRDDSKNTAYLQMNNLKTEDTAVYYCVRHGNFGNSYISYWAYWGQGTLVTVSSGGGGSGGGGSGGGGSQTVVTQEPSLTVSPGGTVTLTCGSSTGAVTSGNYPNWVQQKPGQAPRGLIGGTKFLAPGTPARFSGSLLGGKAALTLSGVQPEDEAEYYCVLWYSNRWVFGGGTKLTVL

SEQ ID NO: 985 - DNA, 1503 bp, synthetic construct
  misc_feature 1..1503: note = hEp 14-H8 LH x I2C HL
  source 1..1503: mol_type = other DNA
gacatcgtgatgacacagactccactctccctgcctgtgacaccaggagagccggcctctatcagctgcaagtccagtcagagtctgttaaacagtggaaatcaaaagaactacttgacctggtaccagcagaaaccagggcagtctcctaaactgttgatctactgggcatccactagggaatctggggtccctgatcgcttctcaggcagtggatctggaacagatttcactctcaaaatcagccgtgtggaggctgaagacgtgggagtttattactgtcagaatgattatagttatccgctcacgttcggtcaagggaccaagcttgagatcaaaggtggtggtggttctggcggcggcggctccggtggtggtggttctcaggtgcagctggtccagtctggagctgagctgaaaaagcctgggtcttcagtgaaggtatcctgcaaggcttctggatacaccttctctaactactggctaggttgggtaaggcagacgcctggacagggacttgagtggatgggagatattttccctggaagtggtaatatccactacaatgagaagttcaagggcagagtcacaatcactgcagacaaatctacgagcacagcctatatggaactcagtagcctgagatctgaggacactgctgtctattactgtgcaagactgaggaactgggacgagcctatggactactggggccaagggaccacggtcaccgtctcctccggaggtggtggatccgaggtgcagctggtcgagtctggaggaggattggtgcagcctggagggtcattgaaactctcatgtgcagcctctggattcaccttcaataagtacgccatgaactgggtccgccaggctccaggaaagggtttggaatgggttgctcgcataagaagtaaatataataattatgcaacatattatgccgattcagtgaaagacaggttcaccatctccagagatgattcaaaaaacactgcctatctacaaatgaacaacttgaaaactgaggacactgccgtgtactactgtgtgagacatgggaacttcggtaatagctacatatcctactgggcttactggggccaagggactctggtcaccgtctcctcaggtggtggtggttctggcggcggcggctccggtggtggtggttctcagactgttgtgactcaggaaccttcactcaccgtatcacctggtggaacagtcacactcacttgtggctcctcgactggggctgttacatctggcaactacccaaactgggtccaacaaaaaccaggtcaggcaccccgtggtctaataggtgggactaagttcctcgcccccggtactcctgccagattctcaggctccctgcttggaggcaaggctgccctcaccctctcaggggtacagccagaggatgaggcagaatattactgtgttctatggtacagcaaccgctgggtgttcggtggaggaaccaaactgactgtccta

SEQ ID NO: 986 - protein, 113 aa, synthetic construct
  REGION 1..113: note = hEp 14-A6 L
DIVMTQTPFSLTVTPGETVSISCKSSQSLLNSGNQKNYLTWYLQKPGQSPQLLIYWASTRESGVPDRFSGSGSGTDFTLTISSVEAEDVGVYYCQNDYSYPLTFGQGTKLEIK

SEQ ID NO: 987 - protein, 17 aa, synthetic construct
  REGION 1..17: note = hEp 14-A6 LCDR1
KSSQSLLNSGNQKNYLT

SEQ ID NO: 988 - protein, 7 aa, synthetic construct
  REGION 1..7: note = hEp 14-A6 LCDR2
WASTRES

SEQ ID NO: 989 - protein, 9 aa, synthetic construct
  REGION 1..9: note = hEp 14-A6 LCDR3
QNDYSYPLT

SEQ ID NO: 990 - DNA, 339 bp, synthetic construct
  misc_feature 1..339: note = hEp 14-A6 L
  source 1..339: mol_type = other DNA
gacatcgtgatgacacagactccattctccctgactgtgacaccaggagagacggtctctatcagctgcaagtccagtcagagtctgttaaacagtggaaatcaaaagaactacttgacctggtacctgcagaaaccagggcagtctcctcaactgttgatctactgggcatccactagggaatctggggtccctgatcgcttctcaggcagtggatctggaacagatttcactctcacaatcagcagtgtggaggctgaagacgtgggagtttattactgtcagaatgattatagttatccgctcacgttcggtcaagggaccaagcttgagatcaaa

SEQ ID NO: 991 - protein, 119 aa, synthetic construct
  REGION 1..119: note = hEp 14-A6 H
QVQLVQSGAELVKPGSSVKVSCKASGYTFSNYWLGWVRQAPGQGLEWIGDIFPGSGNIHYNEKFKGKVTITADKSTSTAYMELSSLRFEDTAVYYCARLRNWDEPMDYWGQGTTVTVSS

SEQ ID NO: 992 - protein, 5 aa, synthetic construct
  REGION 1..5: note = hEp 14-A6 HCDR1
NYWLG

SEQ ID NO: 993 - protein, 17 aa, synthetic construct
  REGION 1..17: note = hEp 14-A6 HCDR2
DIFPGSGNIHYNEKFKG

SEQ ID NO: 994 - protein, 10 aa, synthetic construct
  REGION 1..10: note = hEp 14-A6 HCDR3
LRNWDEPMDY

SEQ ID NO: 995 - DNA, 357 bp, synthetic construct
  misc_feature 1..357: note = hEp 14-A6 H
  source 1..357: mol_type = other DNA
caggtgcagctggtccagtctggagctgagctggtaaagcctgggtcttcagtgaaggtatcctgcaaggcttctggatacaccttctctaactactggctaggttgggtaaggcaggcgcctggacagggacttgagtggattggagatattttccctggaagtggtaatatccactacaatgagaagttcaagggcaaagtcacaatcactgcagacaaatctacgagcacagcctatatggaactcagtagcctgagatttgaggacactgctgtctattactgtgcaagactgaggaactgggacgagcctatggactactggggccaagggaccacggtcaccgtctcctcc

SEQ ID NO: 996 - protein, 501 aa, synthetic construct
  REGION 1..501: note = hEp 14-A6 LH x I2C HL
DIVMTQTPFSLTVTPGETVSISCKSSQSLLNSGNQKNYLTWYLQKPGQSPQLLIYWASTRESGVPDRFSGSGSGTDFTLTISSVEAEDVGVYYCQNDYSYPLTFGQGTKLEIKGGGGSGGGGSGGGGSQVQLVQSGAELVKPGSSVKVSCKASGYTFSNYWLGWVRQAPGQGLEWIGDIFPGSGNIHYNEKFKGKVTITADKSTSTAYMELSSLRFEDTAVYYCARLRNWDEPMDYWGQGTTVTVSSGGGGSEVQLVESGGGLVQPGGSLKLSCAASGFTFNKYAMNWVRQAPGKGLEWVARIRSKYNNYATYYADSVKDRFTISRDDSKNTAYLQMNNLKTEDTAVYYCVRHGNFGNSYISYWAYWGQGTLVTVSSGGGGSGGGGSGGGGSQTVVTQEPSLTVSPGGTVTLTCGSSTGAVTSGNYPNWVQQKPGQAPRGLIGGTKFLAPGTPARFSGSLLGGKAALTLSGVQPEDEAEYYCVLWYSNRWVFGGGTKLTVL

SEQ ID NO: 997 - DNA, 1503 bp, synthetic construct
  misc_feature 1..1503: note = hEp 14-A6 LH x I2C HL
  source 1..1503: mol_type = other DNA
gacatcgtgatgacacagactccattctccctgactgtgacaccaggagagacggtctctatcagctgcaagtccagtcagagtctgttaaacagtggaaatcaaaagaactacttgacctggtacctgcagaaaccagggcagtctcctcaactgttgatctactgggcatccactagggaatctggggtccctgatcgcttctcaggcagtggatctggaacagatttcactctcacaatcagcagtgtggaggctgaagacgtgggagtttattactgtcagaatgattatagttatccgctcacgttcggtcaagggaccaagcttgagatcaaaggtggtggtggttctggcggcggcggctccggtggtggtggttctcaggtgcagctggtccagtctggagctgagctggtaaagcctgggtcttcagtgaaggtatcctgcaaggcttctggatacaccttctctaactactggctaggttgggtaaggcaggcgcctggacagggacttgagtggattggagatattttccctggaagtggtaatatccactacaatgagaagttcaagggcaaagtcacaatcactgcagacaaatctacgagcacagcctatatggaactcagtagcctgagatttgaggacactgctgtctattactgtgcaagactgaggaactgggacgagcctatggactactggggccaagggaccacggtcaccgtctcctccggaggtggtggatccgaggtgcagctggtcgagtctggaggaggattggtgcagcctggagggtcattgaaactctcatgtgcagcctctggattcaccttcaataagtacgccatgaactgggtccgccaggctccaggaaagggtttggaatgggttgctcgcataagaagtaaatataataattatgcaacatattatgccgattcagtgaaagacaggttcaccatctccagagatgattcaaaaaacactgcctatctacaaatgaacaacttgaaaactgaggacactgccgtgtactactgtgtgagacatgggaacttcggtaatagctacatatcctactgggcttactggggccaagggactctggtcaccgtctcctcaggtggtggtggttctggcggcggcggctccggtggtggtggttctcagactgttgtgactcaggaaccttcactcaccgtatcacctggtggaacagtcacactcacttgtggctcctcgactggggctgttacatctggcaactacccaaactgggtccaacaaaaaccaggtcaggcaccccgtggtctaataggtgggactaagttcctcgcccccggtactcctgccagattctcaggctccctgcttggaggcaaggctgccctcaccctctcaggggtacagccagaggatgaggcagaatattactgtgttctatggtacagcaaccgctgggtgttcggtggaggaaccaaactgactgtccta

SEQ ID NO: 998 - protein, 113 aa, synthetic construct
  REGION 1..113: note = hEp 14-D1 L
DIVMTQTPFSLTVTPGEPASISCKSSQSLLNSGNQKNYLTWYQQKPGQPPQLLIYWASTRESGVPDRFSGSGSGTDFTLKISRVEAEDVAVYYCQNDYSYPLTFGQGTKLEIK

SEQ ID NO: 999 - protein, 17 aa, synthetic construct
  REGION 1..17: note = hEp 14-D1 LCDR1
KSSQSLLNSGNQKNYLT

SEQ ID NO: 1000 - protein, 7 aa, synthetic construct
  REGION 1..7: note = hEp 14-D1 LCDR2
WASTRES

SEQ ID NO: 1001 - protein, 9 aa, synthetic construct
  REGION 1..9: note = hEp 14-D1 LCDR3
QNDYSYPLT

SEQ ID NO: 1002 - DNA, 339 bp, synthetic construct
  misc_feature 1..339: note = hEp 14-D1 L
  source 1..339: mol_type = other DNA
gacatcgtgatgacacagactccattctccctgactgtgacaccaggagagccggcctctatcagctgcaagtccagtcagagtctgttaaacagtggaaatcaaaagaactacttgacctggtaccagcagaaaccagggcagcctcctcaactgttgatctactgggcatccactagggaatctggggtccctgatcgcttctcaggcagtggatctggaacagatttcactctcaaaatcagccgtgtggaggctgaagacgtggcagtttattactgtcagaatgattatagttatccgctcacgttcggtcaagggaccaagcttgagatcaaa

SEQ ID NO: 1003 - protein, 119 aa, synthetic construct
  REGION 1..119: note = hEp 14-D1 H
QVQLVQSGAELKKPGSSVKISCKASGYTFSNYWLGWVRQAPGQGLEWMGDIFPGSGNIHYNEKFKGRVTLTADKSTSTAYMELSSLTSEDTAVYYCARLRNWDEPMDYWGQGTTVTVSS

SEQ ID NO: 1004 - protein, 5 aa, synthetic construct
  REGION 1..5: note = hEp 14-D1 HCDR1
NYWLG

SEQ ID NO: 1005 - protein, 17 aa, synthetic construct
  REGION 1..17: note = hEp 14-D1 HCDR2
DIFPGSGNIHYNEKFKG

SEQ ID NO: 1006 - protein, 10 aa, synthetic construct
  REGION 1..10: note = hEp 14-D1 HCDR3
LRNWDEPMDY

SEQ ID NO: 1007 - DNA, 357 bp, synthetic construct
  misc_feature 1..357: note = hEp 14-D1 H
  source 1..357: mol_type = other DNA
caggtgcagctggtccagtctggagctgagctgaaaaagcctgggtcttcagtgaagatatcctgcaaggcttctggatacaccttctctaactactggctaggttgggtaaggcaggcgcctggacagggacttgagtggatgggagatattttccctggaagtggtaatatccactacaatgagaagttcaagggcagagtcacactcactgcagacaaatctacgagcacagcctatatggaactcagtagcctgacatctgaggacactgctgtctattactgtgcaagactgaggaactgggacgagcctatggactactggggccaagggaccacggtcaccgtctcctcc

SEQ ID NO: 1008 - protein, 501 aa, synthetic construct
  REGION 1..501: note = hEp 14-D1 LH x I2C HL
DIVMTQTPFSLTVTPGEPASISCKSSQSLLNSGNQKNYLTWYQQKPGQPPQLLIYWASTRESGVPDRFSGSGSGTDFTLKISRVEAEDVAVYYCQNDYSYPLTFGQGTKLEIKGGGGSGGGGSGGGGSQVQLVQSGAELKKPGSSVKISCKASGYTFSNYWLGWVRQAPGQGLEWMGDIFPGSGNIHYNEKFKGRVTLTADKSTSTAYMELSSLTSEDTAVYYCARLRNWDEPMDYWGQGTTVTVSSGGGGSEVQLVESGGGLVQPGGSLKLSCAASGFTFNKYAMNWVRQAPGKGLEWVARIRSKYNNYATYYADSVKDRFTISRDDSKNTAYLQMNNLKTEDTAVYYCVRHGNFGNSYISYWAYWGQGTLVTVSSGGGGSGGGGSGGGGSQTVVTQEPSLTVSPGGTVTLTCGSSTGAVTSGNYPNWVQQKPGQAPRGLIGGTKFLAPGTPARFSGSLLGGKAALTLSGVQPEDEAEYYCVLWYSNRWVFGGGTKLTVL

SEQ ID NO: 1009 - DNA, 1503 bp, synthetic construct
  misc_feature 1..1503: note = hEp 14-D1 LH x I2C HL
  source 1..1503: mol_type = other DNA
gacatcgtgatgacacagactccattctccctgactgtgacaccaggagagccggcctctatcagctgcaagtccagtcagagtctgttaaacagtggaaatcaaaagaactacttgacctggtaccagcagaaaccagggcagcctcctcaactgttgatctactgggcatccactagggaatctggggtccctgatcgcttctcaggcagtggatctggaacagatttcactctcaaaatcagccgtgtggaggctgaagacgtggcagtttattactgtcagaatgattatagttatccgctcacgttcggtcaagggaccaagcttgagatcaaaggtggtggtggttctggcggcggcggctccggtggtggtggttctcaggtgcagctggtccagtctggagctgagctgaaaaagcctgggtcttcagtgaagatatcctgcaaggcttctggatacaccttctctaactactggctaggttgggtaaggcaggcgcctggacagggacttgagtggatgggagatattttccctggaagtggtaatatccactacaatgagaagttcaagggcagagtcacactcactgcagacaaatctacgagcacagcctatatggaactcagtagcctgacatctgaggacactgctgtctattactgtgcaagactgaggaactgggacgagcctatggactactggggccaagggaccacggtcaccgtctcctccggaggtggtggatccgaggtgcagctggtcgagtctggaggaggattggtgcagcctggagggtcattgaaactctcatgtgcagcctctggattcaccttcaataagtacgccatgaactgggtccgccaggctccaggaaagggtttggaatgggttgctcgcataagaagtaaatataataattatgcaacatattatgccgattcagtgaaagacaggttcaccatctccagagatgattcaaaaaacactgcctatctacaaatgaacaacttgaaaactgaggacactgccgtgtactactgtgtgagacatgggaacttcggtaatagctacatatcctactgggcttactggggccaagggactctggtcaccgtctcctcaggtggtggtggttctggcggcggcggctccggtggtggtggttctcagactgttgtgactcaggaaccttcactcaccgtatcacctggtggaacagtcacactcacttgtggctcctcgactggggctgttacatctggcaactacccaaactgggtccaacaaaaaccaggtcaggcaccccgtggtctaataggtgggactaagttcctcgcccccggtactcctgccagattctcaggctccctgcttggaggcaaggctgccctcaccctctcaggggtacagccagaggatgaggcagaatattactgtgttctatggtacagcaaccgctgggtgttcggtggaggaaccaaactgactgtccta

SEQ ID NO: 1010 - protein, 113 aa, synthetic construct
  REGION 1..113: note = hEp 14-G6 L
DIVMTQTPLSLTVTPGEPVSISCKSSQSLLNSGNQKNYLTWYLQKPGQPPQLLIYWASTRESGVPDRFSGSGSGTDFTLKISRVQAEDVGVYYCQNDYSYPLTFGQGTKLEIK

SEQ ID NO: 1011 - protein, 17 aa, synthetic construct
  REGION 1..17: note = hEp 14-G6 LCDR1
KSSQSLLNSGNQKNYLT

SEQ ID NO: 1012 - protein, 7 aa, synthetic construct
  REGION 1..7: note = hEp 14-G6 LCDR2
WASTRES

SEQ ID NO: 1013 - protein, 9 aa, synthetic construct
  REGION 1..9: note = hEp 14-G6 LCDR3
QNDYSYPLT

SEQ ID NO: 1014 - DNA, 339 bp, synthetic construct
  misc_feature 1..339: note = hEp 14-G6 L
  source 1..339: mol_type = other DNA
gacatcgtgatgacacagactccactctccctgactgtgacaccaggagagccggtctctatcagctgcaagtccagtcagagtctgttaaacagtggaaatcaaaagaactacttgacctggtacctgcagaaaccagggcagcctcctcaactgttgatctactgggcatccactagggaatctggggtccctgatcgcttctcaggcagtggatctggaacagatttcactctcaaaatcagccgtgtgcaggctgaagacgtgggagtttattactgtcagaatgattatagttatccgctcacgttcggtcaagggaccaagcttgagatcaaa

SEQ ID NO: 1015 - protein, 119 aa, synthetic construct
  REGION 1..119: note = hEp 14-G6 H
QVQLVQSGAEVKKPGSSVKVSCKASGYTFSNYWLGWVRQAPGQGLEWMGDIFPGSGNIHYNEKFKGRATITADKSTSTAYMELSSLTSEDTAVYYCARLRNWDEPMDYWGQGTTVTVSS

SEQ ID NO: 1016 - protein, 5 aa, synthetic construct
  REGION 1..5: note = hEp 14-G6 HCDR1
NYWLG

SEQ ID NO: 1017 - protein, 17 aa, synthetic construct
  REGION 1..17: note = hEp 14-G6 HCDR2
DIFPGSGNIHYNEKFKG

SEQ ID NO: 1018 - protein, 10 aa, synthetic construct
  REGION 1..10: note = hEp 14-G6 HCDR3
LRNWDEPMDY

SEQ ID NO: 1019 - DNA, 357 bp, synthetic construct
  misc_feature 1..357: note = hEp 14-G6 H
  source 1..357: mol_type = other DNA
caggtgcagctggtccagtctggagctgaggtgaaaaagcctgggtcttcagtgaaggtatcctgcaaggcttctggatacaccttctctaactactggctaggttgggtaaggcaggcgcctggacagggacttgagtggatgggagatattttccctggaagtggtaatatccactacaatgagaagttcaagggcagagccacaatcactgcagacaaatctacgagcacagcctatatggaactcagtagcctgacatctgaggacactgctgtctattactgtgcaagactgaggaactgggacgagcctatggactactggggccaagggaccacggtcaccgtctcctcc

SEQ ID NO: 1020 - protein, 501 aa, synthetic construct
  REGION 1..501: note = hEp 14-G6 LH x I2C HL
DIVMTQTPLSLTVTPGEPVSISCKSSQSLLNSGNQKNYLTWYLQKPGQPPQLLIYWASTRESGVPDRFSGSGSGTDFTLKISRVQAEDVGVYYCQNDYSYPLTFGQGTKLEIKGGGGSGGGGSGGGGSQVQLVQSGAEVKKPGSSVKVSCKASGYTFSNYWLGWVRQAPGQGLEWMGDIFPGSGNIHYNEKFKGRATITADKSTSTAYMELSSLTSEDTAVYYCARLRNWDEPMDYWGQGTTVTVSSGGGGSEVQLVESGGGLVQPGGSLKLSCAASGFTFNKYAMNWVRQAPGKGLEWVARIRSKYNNYATYYADSVKDRFTISRDDSKNTAYLQMNNLKTEDTAVYYCVRHGNFGNSYISYWAYWGQGTLVTVSSGGGGSGGGGSGGGGSQTVVTQEPSLTVSPGGTVTLTCGSSTGAVTSGNYPNWVQQKPGQAPRGLIGGTKFLAPGTPARFSGSLLGGKAALTLSGVQPEDEAEYYCVLWYSNRWVFGGGTKLTVL

SEQ ID NO: 1021 - DNA, 1503 bp, synthetic construct
  misc_feature 1..1503: note = hEp 14-G6 LH x I2C HL
  source 1..1503: mol_type = other DNA
gacatcgtgatgacacagactccactctccctgactgtgacaccaggagagccggtctctatcagctgcaagtccagtcagagtctgttaaacagtggaaatcaaaagaactacttgacctggtacctgcagaaaccagggcagcctcctcaactgttgatctactgggcatccactagggaatctggggtccctgatcgcttctcaggcagtggatctggaacagatttcactctcaaaatcagccgtgtgcaggctgaagacgtgggagtttattactgtcagaatgattatagttatccgctcacgttcggtcaagggaccaagcttgagatcaaaggtggtggtggttctggcggcggcggctccggtggtggtggttctcaggtgcagctggtccagtctggagctgaggtgaaaaagcctgggtcttcagtgaaggtatcctgcaaggcttctggatacaccttctctaactactggctaggttgggtaaggcaggcgcctggacagggacttgagtggatgggagatattttccctggaagtggtaatatccactacaatgagaagttcaagggcagagccacaatcactgcagacaaatctacgagcacagcctatatggaactcagtagcctgacatctgaggacactgctgtctattactgtgcaagactgaggaactgggacgagcctatggactactggggccaagggaccacggtcaccgtctcctccggaggtggtggatccgaggtgcagctggtcgagtctggaggaggattggtgcagcctggagggtcattgaaactctcatgtgcagcctctggattcaccttcaataagtacgccatgaactgggtccgccaggctccaggaaagggtttggaatgggttgctcgcataagaagtaaatataataattatgcaacatattatgccgattcagtgaaagacaggttcaccatctccagagatgattcaaaaaacactgcctatctacaaatgaacaacttgaaaactgaggacactgccgtgtactactgtgtgagacatgggaacttcggtaatagctacatatcctactgggcttactggggccaagggactctggtcaccgtctcctcaggtggtggtggttctggcggcggcggctccggtggtggtggttctcagactgttgtgactcaggaaccttcactcaccgtatcacctggtggaacagtcacactcacttgtggctcctcgactggggctgttacatctggcaactacccaaactgggtccaacaaaaaccaggtcaggcaccccgtggtctaataggtgggactaagttcctcgcccccggtactcctgccagattctcaggctccctgcttggaggcaaggctgccctcaccctctcaggggtacagccagaggatgaggcagaatattactgtgttctatggtacagcaaccgctgggtgttcggtggaggaaccaaactgactgtccta

SEQ ID NO: 1022 - protein, 113 aa, synthetic construct
  REGION 1..113: note = hEp 14-H4 L
DIVMTQTPLSLPVTPGETASISCKSSQSLLNSGNQKNYLTWYQQKPGQSPQLLIYWASTRESGVPDRFSGSGSGTDFTLKISSVEAEDVGVYYCQNDYSYPLTFGQGTKLEIK

SEQ ID NO: 1023 - protein, 17 aa, synthetic construct
  REGION 1..17: note = hEp 14-H4 LCDR1
KSSQSLLNSGNQKNYLT

SEQ ID NO: 1024 - protein, 7 aa, synthetic construct
  REGION 1..7: note = hEp 14-H4 LCDR2
WASTRES

SEQ ID NO: 1025 - protein, 9 aa, synthetic construct
  REGION 1..9: note = hEp 14-H4 LCDR3
QNDYSYPLT

SEQ ID NO: 1026 - DNA, 339 bp, synthetic construct
  misc_feature 1..339: note = hEp 14-H4 L
  source 1..339: mol_type = other DNA
gacatcgtgatgacacagactccactctccctgcctgtgacaccaggagagacggcctctatcagctgcaagtccagtcagagtctgttaaacagtggaaatcaaaagaactacttgacctggtaccagcagaaaccagggcagtctcctcaactgttgatctactgggcatccactagggaatctggggtccctgatcgcttctcaggcagtggatctggaacagatttcactctcaaaatcagcagtgtggaggctgaagacgtgggagtttattactgtcagaatgattatagttatccgctcacgttcggtcaagggaccaagcttgagatcaaa

SEQ ID NO: 1027 - protein, 119 aa, synthetic construct
  REGION 1..119: note = hEp 14-H4 H
QVQLVQSGAEVVKPGSSVKVSCKASGYTFSNYWLGWVRQAPGQGLEWMGDIFPGSGNIHYNEKFKGRVTITADKSTSTAYMELSSLTSEDTAVYYCARLRNWDEPMDYWGQGTTVTVSS

SEQ ID NO: 1028 - protein, 5 aa, synthetic construct
  REGION 1..5: note = hEp 14-H4 HCDR1
NYWLG

SEQ ID NO: 1029 - protein, 17 aa, synthetic construct
  REGION 1..17: note = hEp 14-H4 HCDR2
DIFPGSGNIHYNEKFKG

SEQ ID NO: 1030 - protein, 10 aa, synthetic construct
  REGION 1..10: note = hEp 14-H4 HCDR3
LRNWDEPMDY

SEQ ID NO: 1031 - DNA, 357 bp, synthetic construct
  misc_feature 1..357: note = hEp 14-H4 H
  source 1..357: mol_type = other DNA
caggtgcagctggtccagtctggagctgaggtggtaaagcctgggtcttcagtgaaggtatcctgcaaggcttctggatacaccttctctaactactggctaggttgggtaaggcaggcgcctggacagggacttgagtggatgggagatattttccctggaagtggtaatatccactacaatgagaagttcaagggcagagtcacaatcactgcagacaaatctacgagcacagcctatatggaactcagtagcctgacatctgaggacactgctgtctattactgtgcaagactgaggaactgggacgagcctatggactactggggccaagggaccacggtcaccgtctcctcc

SEQ ID NO: 1032 - protein, 501 aa, synthetic construct
  REGION 1..501: note = hEp 14-H4 LH x I2C HL
DIVMTQTPLSLPVTPGETASISCKSSQSLLNSGNQKNYLTWYQQKPGQSPQLLIYWASTRESGVPDRFSGSGSGTDFTLKISSVEAEDVGVYYCQNDYSYPLTFGQGTKLEIKGGGGSGGGGSGGGGSQVQLVQSGAEVVKPGSSVKVSCKASGYTFSNYWLGWVRQAPGQGLEWMGDIFPGSGNIHYNEKFKGRVTITADKSTSTAYMELSSLTSEDTAVYYCARLRNWDEPMDYWGQGTTVTVSSGGGGSEVQLVESGGGLVQPGGSLKLSCAASGFTFNKYAMNWVRQAPGKGLEWVARIRSKYNNYATYYADSVKDRFTISRDDSKNTAYLQMNNLKTEDTAVYYCVRHGNFGNSYISYWAYWGQGTLVTVSSGGGGSGGGGSGGGGSQTVVTQEPSLTVSPGGTVTLTCGSSTGAVTSGNYPNWVQQKPGQAPRGLIGGTKFLAPGTPARFSGSLLGGKAALTLSGVQPEDEAEYYCVLWYSNRWVFGGGTKLTVL

SEQ ID NO: 1033 - DNA, 1503 bp, synthetic construct
  misc_feature 1..1503: note = hEp 14-H4 LH x I2C HL
  source 1..1503: mol_type = other DNA
gacatcgtgatgacacagactccactctccctgcctgtgacaccaggagagacggcctctatcagctgcaagtccagtcagagtctgttaaacagtggaaatcaaaagaactacttgacctggtaccagcagaaaccagggcagtctcctcaactgttgatctactgggcatccactagggaatctggggtccctgatcgcttctcaggcagtggatctggaacagatttcactctcaaaatcagcagtgtggaggctgaagacgtgggagtttattactgtcagaatgattatagttatccgctcacgttcggtcaagggaccaagcttgagatcaaaggtggtggtggttctggcggcggcggctccggtggtggtggttctcaggtgcagctggtccagtctggagctgaggtggtaaagcctgggtcttcagtgaaggtatcctgcaaggcttctggatacaccttctctaactactggctaggttgggtaaggcaggcgcctggacagggacttgagtggatgggagatattttccctggaagtggtaatatccactacaatgagaagttcaagggcagagtcacaatcactgcagacaaatctacgagcacagcctatatggaactcagtagcctgacatctgaggacactgctgtctattactgtgcaagactgaggaactgggacgagcctatggactactggggccaagggaccacggtcaccgtctcctccggaggtggtggatccgaggtgcagctggtcgagtctggaggaggattggtgcagcctggagggtcattgaaactctcatgtgcagcctctggattcaccttcaataagtacgccatgaactgggtccgccaggctccaggaaagggtttggaatgggttgctcgcataagaagtaaatataataattatgcaacatattatgccgattcagtgaaagacaggttcaccatctccagagatgattcaaaaaacactgcctatctacaaatgaacaacttgaaaactgaggacactgccgtgtactactgtgtgagacatgggaacttcggtaatagctacatatcctactgggcttactggggccaagggactctggtcaccgtctcctcaggtggtggtggttctggcggcggcggctccggtggtggtggttctcagactgttgtgactcaggaaccttcactcaccgtatcacctggtggaacagtcacactcacttgtggctcctcgactggggctgttacatctggcaactacccaaactgggtccaacaaaaaccaggtcaggcaccccgtggtctaataggtgggactaagttcctcgcccccggtactcctgccagattctcaggctccctgcttggaggcaaggctgccctcaccctctcaggggtacagccagaggatgaggcagaatattactgtgttctatggtacagcaaccgctgggtgttcggtggaggaaccaaactgactgtccta

SEQ ID NO: 1034 - protein, 113 aa, synthetic construct
  REGION 1..113: note = hEp 17-A6 L
DIVMTQTPLSLTVTPGEPVSISCKSSQSLLNSGNQKNYLTWYLQKPGQPPQLLIYWASTRESGVPDRFSGSGSGTDFTLKISRVEAEDVGVYYCQNDYSYPLTFGQGTKLEIK

SEQ ID NO: 1035 - protein, 17 aa, synthetic construct
  REGION 1..17: note = hEp 17-A6 LCDR1
KSSQSLLNSGNQKNYLT

SEQ ID NO: 1036 - protein, 7 aa, synthetic construct
  REGION 1..7: note = hEp 17-A6 LCDR2
WASTRES

SEQ ID NO: 1037 - protein, 9 aa, synthetic construct
  REGION 1..9: note = hEp 17-A6 LCDR3
QNDYSYPLT

SEQ ID NO: 1038 - DNA, 339 bp, synthetic construct
  misc_feature 1..339: note = hEp 17-A6 L
  source 1..339: mol_type = other DNA
gacatcgtgatgacacagactccactctccctgactgtgacaccaggagagccggtctctatcagctgcaagtccagtcagagtctgttaaacagtggaaatcaaaagaactacttgacctggtacctgcagaaaccagggcagcctcctcaactgttgatctactgggcatccactagggaatctggggtccctgatcgcttctcaggcagtggatctggaacagatttcactctcaaaatcagccgtgtggaggctgaagacgtgggagtttattactgtcagaatgattatagttatccgctcacgttcggtcaagggaccaagcttgagatcaaa

SEQ ID NO: 1039 - protein, 119 aa, synthetic construct
  REGION 1..119: note = hEp 17-A6 H
QVQLVQSGAEVKRPGSSVKISCKASGYTFSNYWLGWVKQAPGQGLEWMGDIFPGSGNIHYNEKFKGRVTITADKSTSTAYMELSSLTSEDTAVYFCARLRNWDEPMDYWGQGTTVTVSS

SEQ ID NO: 1040 - protein, 5 aa, synthetic construct
  REGION 1..5: note = hEp 17-A6 HCDR1
NYWLG

SEQ ID NO: 1041 - protein, 17 aa, synthetic construct
  REGION 1..17: note = hEp 17-A6 HCDR2
DIFPGSGNIHYNEKFKG

SEQ ID NO: 1042 - protein, 10 aa, synthetic construct
  REGION 1..10: note = hEp 17-A6 HCDR3
LRNWDEPMDY

SEQ ID NO: 1043 - DNA, 357 bp, synthetic construct
  misc_feature 1..357: note = hEp 17-A6 H
  source 1..357: mol_type = other DNA
caggtgcagctggtccagtctggagctgaggtgaaaaggcctgggtcttcagtgaagatatcctgcaaggcttctggatacaccttctctaactactggctaggttgggtaaagcaggcgcctggacagggacttgagtggatgggagatattttccccggaagtggtaatatccactacaatgagaagttcaagggcagagtcacaatcactgcagacaaatctacgagcacagcctatatggaactcagtagcctgacatctgaggacactgctgtctatttctgtgcaagactgaggaactgggacgagcctatggactactggggccaagggaccacggtcaccgtctcctcc

SEQ ID NO: 1044 - protein, 501 aa, synthetic construct
  REGION 1..501: note = hEp 17-A6 LH x I2C HL
DIVMTQTPLSLTVTPGEPVSISCKSSQSLLNSGNQKNYLTWYLQKPGQPPQLLIYWASTRESGVPDRFSGSGSGTDFTLKISRVEAEDVGVYYCQNDYSYPLTFGQGTKLEIKGGGGSGGGGSGGGGSQVQLVQSGAEVKRPGSSVKISCKASGYTFSNYWLGWVKQAPGQGLEWMGDIFPGSGNIHYNEKFKGRVTITADKSTSTAYMELSSLTSEDTAVYFCARLRNWDEPMDYWGQGTTVTVSSGGGGSEVQLVESGGGLVQPGGSLKLSCAASGFTFNKYAMNWVRQAPGKGLEWVARIRSKYNNYATYYADSVKDRFTISRDDSKNTAYLQMNNLKTEDTAVYYCVRHGNFGNSYISYWAYWGQGTLVTVSSGGGGSGGGGSGGGGSQTVVTQEPSLTVSPGGTVTLTCGSSTGAVTSGNYPNWVQQKPGQAPRGLIGGTKFLAPGTPARFSGSLLGGKAALTLSGVQPEDEAEYYCVLWYSNRWVFGGGTKLTVL

SEQ ID NO: 1045 - DNA, 1503 bp, synthetic construct
  misc_feature 1..1503: note = hEp 17-A6 LH x I2C HL
  source 1..1503: mol_type = other DNA
gacatcgtgatgacacagactccactctccctgactgtgacaccaggagagccggtctctatcagctgcaagtccagtcagagtctgttaaacagtggaaatcaaaagaactacttgacctggtacctgcagaaaccagggcagcctcctcaactgttgatctactgggcatccactagggaatctggggtccctgatcgcttctcaggcagtggatctggaacagatttcactctcaaaatcagccgtgtggaggctgaagacgtgggagtttattactgtcagaatgattatagttatccgctcacgttcggtcaagggaccaagcttgagatcaaaggtggtggtggttctggcggcggcggctccggtggtggtggttctcaggtgcagctggtccagtctggagctgaggtgaaaaggcctgggtcttcagtgaagatatcctgcaaggcttctggatacaccttctctaactactggctaggttgggtaaagcaggcgcctggacagggacttgagtggatgggagatattttccccggaagtggtaatatccactacaatgagaagttcaagggcagagtcacaatcactgcagacaaatctacgagcacagcctatatggaactcagtagcctgacatctgaggacactgctgtctatttctgtgcaagactgaggaactgggacgagcctatggactactggggccaagggaccacggtcaccgtctcctccggaggtggtggatccgaggtgcagctggtcgagtctggaggaggattggtgcagcctggagggtcattgaaactctcatgtgcagcctctggattcaccttcaataagtacgccatgaactgggtccgccaggctccaggaaagggtttggaatgggttgctcgcataagaagtaaatataataattatgcaacatattatgccgattcagtgaaagacaggttcaccatctccagagatgattcaaaaaacactgcctatctacaaatgaacaacttgaaaactgaggacactgccgtgtactactgtgtgagacatgggaacttcggtaatagctacatatcctactgggcttactggggccaagggactctggtcaccgtctcctcaggtggtggtggttctggcggcggcggctccggtggtggtggttctcagactgttgtgactcaggaaccttcactcaccgtatcacctggtggaacagtcacactcacttgtggctcctcgactggggctgttacatctggcaactacccaaactgggtccaacaaaaaccaggtcaggcaccccgtggtctaataggtgggactaagttcctcgcccccggtactcctgccagattctcaggctccctgcttggaggcaaggctgccctcaccctctcaggggtacagccagaggatgaggcagaatattactgtgttctatggtacagcaaccgctgggtgttcggtggaggaaccaaactgactgtccta

SEQ ID NO: 1046 - protein, 113 aa, synthetic construct
  REGION 1..113: note = hEp 17-E9 L
DIVMTQTPLSLTVTPGEPVSISCKSSQSLLNSGNQKNYLTWYLQKPGQPPKLLIYWASTRESGVPDRFSGSGSGTDFTLNISRVEAEDVGVYYCQNDYSYPLTFGQGTKLEIK

SEQ ID NO: 1047 - protein, 17 aa, synthetic construct
  REGION 1..17: note = hEp 17-E9 LCDR1
KSSQSLLNSGNQKNYLT

SEQ ID NO: 1048 - protein, 7 aa, synthetic construct
  REGION 1..7: note = hEp 17-E9 LCDR2
WASTRES

SEQ ID NO: 1049 - protein, 9 aa, synthetic construct
  REGION 1..9: note = hEp 17-E9 LCDR3
QNDYSYPLT

SEQ ID NO: 1050 - DNA, 339 bp, synthetic construct
  misc_feature 1..339: note = hEp 17-E9 L
  source 1..339: mol_type = other DNA
gacatcgtgatgacacagactccactctccctgactgtgacaccaggagagccggtctctatcagctgcaagtccagtcagagtctgttaaacagtggaaatcaaaagaactacttgacctggtacctgcagaaaccagggcagcctcctaaactgttgatctactgggcatccactagggaatctggggtccctgatcgcttctcaggcagtggatctggaacagatttcactctcaacatcagccgtgtggaggctgaagacgtgggagtttattactgtcagaatgattatagttatccgctcacgttcggtcaagggaccaagcttgagatcaaa

SEQ ID NO: 1051 - protein, 119 aa, synthetic construct
  REGION 1..119: note = hEp 17-E9 H
QVQLVQSGAEVKKPGSSVKVSCKASGYTFSNYWLGWVKQAPGHGLEWMGDIFPGSGNIHYNEKFKGRVTITADKSTSTAYMELSSLRSEDTAVYYCARLRNWDEPMDYWGQGTTVTVSS

SEQ ID NO: 1052 - protein, 5 aa, synthetic construct
  REGION 1..5: note = hEp 17-E9 HCDR1
NYWLG

SEQ ID NO: 1053 - protein, 17 aa, synthetic construct
  REGION 1..17: note = hEp 17-E9 HCDR2
DIFPGSGNIHYNEKFKG

SEQ ID NO: 1054 - protein, 10 aa, synthetic construct
  REGION 1..10: note = hEp 17-E9 HCDR3
LRNWDEPMDY

SEQ ID NO: 1055 - DNA, 357 bp, synthetic construct
  misc_feature 1..357: note = hEp 17-E9 H
  source 1..357: mol_type = other DNA
caggtgcagctggtccagtctggagctgaggtgaaaaagcctgggtcttcagtgaaggtatcctgcaaggcttctggatacaccttctctaactactggctaggttgggtaaagcaggcgcctggacatggacttgagtggatgggagatattttccctggaagtggtaatatccactacaatgagaagttcaagggcagagtcacaatcactgcagacaaatctacgagcacagcctatatggaactcagtagcctgagatctgaggacactgctgtctattactgtgcaagactgaggaactgggacgagcctatggactactggggccaagggaccacggtcaccgtctcctcc

SEQ ID NO: 1056 - protein, 501 aa, synthetic construct
  REGION 1..501: note = hEp 17-E9 LH x I2C HL
DIVMTQTPLSLTVTPGEPVSISCKSSQSLLNSGNQKNYLTWYLQKPGQPPKLLIYWASTRESGVPDRFSGSGSGTDFTLNISRVEAEDVGVYYCQNDYSYPLTFGQGTKLEIKGGGGSGGGGSGGGGSQVQLVQSGAEVKKPGSSVKVSCKASGYTFSNYWLGWVKQAPGHGLEWMGDIFPGSGNIHYNEKFKGRVTITADKSTSTAYMELSSLRSEDTAVYYCARLRNWDEPMDYWGQGTTVTVSSGGGGSEVQLVESGGGLVQPGGSLKLSCAASGFTFNKYAMNWVRQAPGKGLEWVARIRSKYNNYATYYADSVKDRFTISRDDSKNTAYLQMNNLKTEDTAVYYCVRHGNFGNSYISYWAYWGQGTLVTVSSGGGGSGGGGSGGGGSQTVVTQEPSLTVSPGGTVTLTCGSSTGAVTSGNYPNWVQQKPGQAPRGLIGGTKFLAPGTPARFSGSLLGGKAALTLSGVQPEDEAEYYCVLWYSNRWVFGGGTKLTVL

SEQ ID NO: 1057 - DNA, 1503 bp, synthetic construct
  misc_feature 1..1503: note = hEp 17-E9 LH x I2C HL
  source 1..1503: mol_type = other DNA
gacatcgtgatgacacagactccactctccctgactgtgacaccaggagagccggtctctatcagctgcaagtccagtcagagtctgttaaacagtggaaatcaaaagaactacttgacctggtacctgcagaaaccagggcagcctcctaaactgttgatctactgggcatccactagggaatctggggtccctgatcgcttctcaggcagtggatctggaacagatttcactctcaacatcagccgtgtggaggctgaagacgtgggagtttattactgtcagaatgattatagttatccgctcacgttcggtcaagggaccaagcttgagatcaaaggtggtggtggttctggcggcggcggctccggtggtggtggttctcaggtgcagctggtccagtctggagctgaggtgaaaaagcctgggtcttcagtgaaggtatcctgcaaggcttctggatacaccttctctaactactggctaggttgggtaaagcaggcgcctggacatggacttgagtggatgggagatattttccctggaagtggtaatatccactacaatgagaagttcaagggcagagtcacaatcactgcagacaaatctacgagcacagcctatatggaactcagtagcctgagatctgaggacactgctgtctattactgtgcaagactgaggaactgggacgagcctatggactactggggccaagggaccacggtcaccgtctcctccggaggtggtggatccgaggtgcagctggtcgagtctggaggaggattggtgcagcctggagggtcattgaaactctcatgtgcagcctctggattcaccttcaataagtacgccatgaactgggtccgccaggctccaggaaagggtttggaatgggttgctcgcataagaagtaaatataataattatgcaacatattatgccgattcagtgaaagacaggttcaccatctccagagatgattcaaaaaacactgcctatctacaaatgaacaacttgaaaactgaggacactgccgtgtactactgtgtgagacatgggaacttcggtaatagctacatatcctactgggcttactggggccaagggactctggtcaccgtctcctcaggtggtggtggttctggcggcggcggctccggtggtggtggttctcagactgttgtgactcaggaaccttcactcaccgtatcacctggtggaacagtcacactcacttgtggctcctcgactggggctgttacatctggcaactacccaaactgggtccaacaaaaaccaggtcaggcaccccgtggtctaataggtgggactaagttcctcgcccccggtactcctgccagattctcaggctccctgcttggaggcaaggctgccctcaccctctcaggggtacagccagaggatgaggcagaatattactgtgttctatggtacagcaaccgctgggtgttcggtggaggaaccaaactgactgtccta

SEQ ID NO: 1058 - protein, 113 aa, synthetic construct
  REGION 1..113: note = hEp 18-A6 L
DIVMTQTPLSLPVTPGEQVSMSCKSSQSLLNSGNQKNYLTWYLQKPGQSPQLLIYWASTRESGVPDRFSGSGSGTDFTLNISSVEAEDVGVYYCQNDYSYPLTFGQGTKLEIK

SEQ ID NO: 1059 - protein, 17 aa, synthetic construct
  REGION 1..17: note = hEp 18-A6 LCDR1
KSSQSLLNSGNQKNYLT

SEQ ID NO: 1060 - protein, 7 aa, synthetic construct
  REGION 1..7: note = hEp 18-A6 LCDR2
WASTRES

SEQ ID NO: 1061 - protein, 9 aa, synthetic construct
  REGION 1..9: note = hEp 18-A6 LCDR3
QNDYSYPLT

SEQ ID NO: 1062 - DNA, 339 bp, synthetic construct
  misc_feature 1..339: note = hEp 18-A6 L
  source 1..339: mol_type = other DNA
gacatcgtgatgacacagactccactctccctgcctgtgacaccaggagagcaggtctctatgagctgcaagtccagtcagagtctgttaaacagtggaaatcaaaagaactacttgacctggtacctgcagaaaccagggcagtctcctcaactgttgatctactgggcatccactagggaatctggggtccctgatcgcttctcaggcagtggatctggaacagatttcactctcaacatcagcagtgtggaggctgaagacgtgggagtttattactgtcagaatgattatagttatccgctcacgttcggtcaagggaccaagcttgagatcaaa

SEQ ID NO: 1063 - protein, 119 aa, synthetic construct
  REGION 1..119: note = hEp 18-A6 H
QVQLVQSGAEVKKPGSSVKVSCKASGYTFSNYWLGWVRQTPGQGLEWMGDIFPGSGNIHYNEKFKGRVTITADKSTSTAYMELSSLTSEDTAVYYCARLRNWDEPMDYWGQGTTVTVSS

SEQ ID NO: 1064 - protein, 5 aa, synthetic construct
  REGION 1..5: note = hEp 18-A6 HCDR1
NYWLG

SEQ ID NO: 1065 - protein, 17 aa, synthetic construct
  REGION 1..17: note = hEp 18-A6 HCDR2
DIFPGSGNIHYNEKFKG

SEQ ID NO: 1066 - protein, 10 aa, synthetic construct
  REGION 1..10: note = hEp 18-A6 HCDR3
LRNWDEPMDY

SEQ ID NO: 1067 - DNA, 357 bp, synthetic construct
  misc_feature 1..357: note = hEp 18-A6 H
  source 1..357: mol_type = other DNA
caggtgcagctggtccagtctggagctgaggtgaaaaagcctgggtcttcagtgaaggtatcctgcaaggcttctggatacaccttctctaactactggctaggttgggtaaggcagacgcctggacagggacttgagtggatgggagatattttccctggaagtggtaatatccactacaatgagaagttcaagggcagagtcacaatcactgcagacaaatctacgagcacagcctatatggaactcagtagcctgacatctgaggacactgctgtctattactgtgcaagactgaggaactgggacgagcctatggactactggggccaagggaccacggtcaccgtctcctcc

SEQ ID NO: 1068 - protein, 113 aa, synthetic construct
  REGION 1..113: note = hEp 18-E3 L
DIVMTQTPLSLPVTPGEPVSISCKSSQSLLNSGNQKNYLTWYLQKPGQPPQLLIYWASTRESGVPDRFSGSGSGTDFTLTISSVQAEDVGVYYCQNDYSYPLTFGQGTKLEIK

SEQ ID NO: 1069 - protein, 17 aa, synthetic construct
  REGION 1..17: note = hEp 18-E3 LCDR1
KSSQSLLNSGNQKNYLT

SEQ ID NO: 1070 - protein, 7 aa, synthetic construct
  REGION 1..7: note = hEp 18-E3 LCDR2
WASTRES

SEQ ID NO: 1071 - protein, 9 aa, synthetic construct
  REGION 1..9: note = hEp 18-E3 LCDR3
QNDYSYPLT

SEQ ID NO: 1072 - DNA, 339 bp, synthetic construct
  misc_feature 1..339: note = hEp 18-E3 L
  source 1..339: mol_type = other DNA
gacatcgtgatgacacagactccactctccctgcctgtgacaccaggagagccggtctctatcagctgcaagtccagtcagagtctgttaaacagtggaaatcaaaagaactacttgacctggtacctgcagaaaccagggcagcctcctcaactgttgatctactgggcatccactagggaatctggggtccctgatcgcttctcaggcagtggatctggaacagatttcactctcaccatcagcagtgtgcaggctgaagacgtgggagtttattactgtcagaatgattatagttatccgctcacgttcggtcaagggaccaagcttgagatcaaa

SEQ ID NO: 1073 - protein, 119 aa, synthetic construct
  REGION 1..119: note = hEp 18-E3 H
QVQLVQSGAELVRPGSSVKISCKASGYAFSNYWLGWVRQAPGQGLEWMGDIFPGSGNIHYNEKFKGRVTLTADKSTSTAYMQLSSLTSEDTAVYYCARLRNWDEPMDYWGQGTTVTVSS

SEQ ID NO: 1074 - protein, 5 aa, synthetic construct
  REGION 1..5: note = hEp 18-E3 HCDR1
NYWLG

SEQ ID NO: 1075 - protein, 17 aa, synthetic construct
  REGION 1..17: note = hEp 18-E3 HCDR2
DIFPGSGNIHYNEKFKG

SEQ ID NO: 1076 - protein, 10 aa, synthetic construct
  REGION 1..10: note = hEp 18-E3 HCDR3
LRNWDEPMDY

SEQ ID NO: 1077 - DNA, 357 bp, synthetic construct
  misc_feature 1..357: note = hEp 18-E3 H
  source 1..357: mol_type = other DNA
caggtgcagctggtccagtctggagctgagctggtaaggcctgggtcttcagtgaagatatcctgcaaggcttctggatacgccttctctaactactggctaggttgggtaaggcaggcgcctggacagggacttgagtggatgggagatattttccctggaagtggtaatatccactacaatgagaagttcaagggcagagtcacactcactgcagacaaatctacgagcacagcctatatgcaactcagtagcctgacatctgaggacactgctgtctattactgtgcaagactgaggaactgggacgagcctatggactactggggccaagggaccacggtcaccgtctcctcc

SEQ ID NO: 1078 - protein, 501 aa, synthetic construct
  REGION 1..501: note = hEp 18-E3 LH x I2C HL
DIVMTQTPLSLPVTPGEPVSISCKSSQSLLNSGNQKNYLTWYLQKPGQPPQLLIYWASTRESGVPDRFSGSGSGTDFTLTISSVQAEDVGVYYCQNDYSYPLTFGQGTKLEIKGGGGSGGGGSGGGGSQVQLVQSGAELVRPGSSVKISCKASGYAFSNYWLGWVRQAPGQGLEWMGDIFPGSGNIHYNEKFKGRVTLTADKSTSTAYMQLSSLTSEDTAVYYCARLRNWDEPMDYWGQGTTVTVSSGGGGSEVQLVESGGGLVQPGGSLKLSCAASGFTFNKYAMNWVRQAPGKGLEWVARIRSKYNNYATYYADSVKDRFTISRDDSKNTAYLQMNNLKTEDTAVYYCVRHGNFGNSYISYWAYWGQGTLVTVSSGGGGSGGGGSGGGGSQTVVTQEPSLTVSPGGTVTLTCGSSTGAVTSGNYPNWVQQKPGQAPRGLIGGTKFLAPGTPARFSGSLLGGKAALTLSGVQPEDEAEYYCVLWYSNRWVFGGGTKLTVL

SEQ ID NO: 1079 - DNA, 1503 bp, synthetic construct
  misc_feature 1..1503: note = hEp 18-E3 LH x I2C HL
  source 1..1503: mol_type = other DNA
gacatcgtgatgacacagactccactctccctgcctgtgacaccaggagagccggtctctatcagctgcaagtccagtcagagtctgttaaacagtggaaatcaaaagaactacttgacctggtacctgcagaaaccagggcagcctcctcaactgttgatctactgggcatccactagggaatctggggtccctgatcgcttctcaggcagtggatctggaacagatttcactctcaccatcagcagtgtgcaggctgaagacgtgggagtttattactgtcagaatgattatagttatccgctcacgttcggtcaagggaccaagcttgagatcaaaggtggtggtggttctggcggcggcggctccggtggtggtggttctcaggtgcagctggtccagtctggagctgagctggtaaggcctgggtcttcagtgaagatatcctgcaaggcttctggatacgccttctctaactactggctaggttgggtaaggcaggcgcctggacagggacttgagtggatgggagatattttccctggaagtggtaatatccactacaatgagaagttcaagggcagagtcacactcactgcagacaaatctacgagcacagcctatatgcaactcagtagcctgacatctgaggacactgctgtctattactgtgcaagactgaggaactgggacgagcctatggactactggggccaagggaccacggtcaccgtctcctccggaggtggtggatccgaggtgcagctggtcgagtctggaggaggattggtgcagcctggagggtcattgaaactctcatgtgcagcctctggattcaccttcaataagtacgccatgaactgggtccgccaggctccaggaaagggtttggaatgggttgctcgcataagaagtaaatataataattatgcaacatattatgccgattcagtgaaagacaggttcaccatctccagagatgattcaaaaaacactgcctatctacaaatgaacaacttgaaaactgaggacactgccgtgtactactgtgtgagacatgggaacttcggtaatagctacatatcctactgggcttactggggccaagggactctggtcaccgtctcctcaggtggtggtggttctggcggcggcggctccggtggtggtggttctcagactgttgtgactcaggaaccttcactcaccgtatcacctggtggaacagtcacactcacttgtggctcctcgactggggctgttacatctggcaactacccaaactgggtccaacaaaaaccaggtcaggcaccccgtggtctaataggtgggactaagttcctcgcccccggtactcctgccagattctcaggctccctgcttggaggcaaggctgccctcaccctctcaggggtacagccagaggatgaggcagaatattactgtgttctatggtacagcaaccgctgggtgttcggtggaggaaccaaactgactgtccta

SEQ ID NO: 1080 - protein, 113 aa, synthetic construct
  REGION 1..113: note = hEp 18-F11 L
DIVMTQTPPSLTVTAGEPVSISCKSSQSLLNSGNQKNYLTWYLQKPGQSPQLLIYWASTRESGVPDRFSGSGSGTDFTLKISSVQAEDVGVYYCQNDYSYPLTFGQGTKLEIK

SEQ ID NO: 1081 - protein, 17 aa, synthetic construct
  REGION 1..17: note = hEp 18-F11 LCDR1
KSSQSLLNSGNQKNYLT

SEQ ID NO: 1082 - protein, 7 aa, synthetic construct
  REGION 1..7: note = hEp 18-F11 LCDR2
WASTRES

SEQ ID NO: 1083 - protein, 9 aa, synthetic construct
  REGION 1..9: note = hEp 18-F11 LCDR3
QNDYSYPLT

SEQ ID NO: 1084 - DNA, 339 bp, synthetic construct
  misc_feature 1..339: note = hEp 18-F11 L
  source 1..339: mol_type = other DNA
gacatcgtgatgacacagactccaccctccctgactgtgacagcaggagagccggtctctatcagctgcaagtccagtcagagtctgttaaacagtggaaatcaaaagaactacttgacctggtacctgcagaaaccagggcagtctcctcaactgttgatctactgggcatccactagggaatctggggtccctgatcgcttctcaggcagtggatctggaacagatttcactctcaaaatcagcagtgtgcaggctgaagacgtgggagtttattactgtcagaatgattatagttatccgctcacgttcggtcaagggaccaagcttgagatcaaa

SEQ ID NO: 1085 - protein, 119 aa, synthetic construct
  REGION 1..119: note = hEp 18-F11 H
QVQLVQSGAEVKRPGSSVKVSCKASGYTFSNYWLGWVRQAPGQGLEWIGDIFPGSGNIHYNEKFKGRVTITADKSTSTAYMELSSLRFEDTAVYYCARLRNWDEPMDYWGQGTTVTVSS

SEQ ID NO: 1086 - protein, 5 aa, synthetic construct
  REGION 1..5: note = hEp 18-F11 HCDR1
NYWLG

SEQ ID NO: 1087 - protein, 17 aa, synthetic construct
  REGION 1..17: note = hEp 18-F11 HCDR2
DIFPGSGNIHYNEKFKG

SEQ ID NO: 1088 - protein, 10 aa, synthetic construct
  REGION 1..10: note = hEp 18-F11 HCDR3
LRNWDEPMDY

SEQ ID NO: 1089 - DNA, 357 bp, synthetic construct
  misc_feature 1..357: note = hEp 18-F11 H
  source 1..357: mol_type = other DNA
caggtgcagctggtccagtctggagctgaggtgaaaaggcctgggtcttcagtgaaggtatcctgcaaggcttctggatacaccttctctaactactggctaggttgggtaaggcaggcgcctggacagggacttgagtggattggagatattttccctggaagtggtaatatccactacaatgagaagttcaagggcagagtcacaatcactgcagacaaatctacgagcacagcctatatggaactcagtagcctgagatttgaggacactgctgtctattactgtgcaagactgaggaactgggacgagcctatggactactggggccaagggaccacggtcaccgtctcctcc

SEQ ID NO: 1090 - protein, 501 aa, synthetic construct
  REGION 1..501: note = hEp 18-F11 LH x I2C HL
DIVMTQTPPSLTVTAGEPVSISCKSSQSLLNSGNQKNYLTWYLQKPGQSPQLLIYWASTRESGVPDRFSGSGSGTDFTLKISSVQAEDVGVYYCQNDYSYPLTFGQGTKLEIKGGGGSGGGGSGGGGSQVQLVQSGAEVKRPGSSVKVSCKASGYTFSNYWLGWVRQAPGQGLEWIGDIFPGSGNIHYNEKFKGRVTITADKSTSTAYMELSSLRFEDTAVYYCARLRNWDEPMDYWGQGTTVTVSSGGGGSEVQLVESGGGLVQPGGSLKLSCAASGFTFNKYAMNWVRQAPGKGLEWVARIRSKYNNYATYYADSVKDRFTISRDDSKNTAYLQMNNLKTEDTAVYYCVRHGNFGNSYISYWAYWGQGTLVTVSSGGGGSGGGGSGGGGSQTVVTQEPSLTVSPGGTVTLTCGSSTGAVTSGNYPNWVQQKPGQAPRGLIGGTKFLAPGTPARFSGSLLGGKAALTLSGVQPEDEAEYYCVLWYSNRWVFGGGTKLTVL

SEQ ID NO: 1091 - DNA, 1503 bp, synthetic construct
  misc_feature 1..1503: note = hEp 18-F11 LH x I2C HL
  source 1..1503: mol_type = other DNA
gacatcgtgatgacacagactccaccctccctgactgtgacagcaggagagccggtctctatcagctgcaagtccagtcagagtctgttaaacagtggaaatcaaaagaactacttgacctggtacctgcagaaaccagggcagtctcctcaactgttgatctactgggcatccactagggaatctggggtccctgatcgcttctcaggcagtggatctggaacagatttcactctcaaaatcagcagtgtgcaggctgaagacgtgggagtttattactgtcagaatgattatagttatccgctcacgttcggtcaagggaccaagcttgagatcaaaggtggtggtggttctggcggcggcggctccggtggtggtggttctcaggtgcagctggtccagtctggagctgaggtgaaaaggcctgggtcttcagtgaaggtatcctgcaaggcttctggatacaccttctctaactactggctaggttgggtaaggcaggcgcctggacagggacttgagtggattggagatattttccctggaagtggtaatatccactacaatgagaagttcaagggcagagtcacaatcactgcagacaaatctacgagcacagcctatatggaactcagtagcctgagatttgaggacactgctgtctattactgtgcaagactgaggaactgggacgagcctatggactactggggccaagggaccacggtcaccgtctcctccggaggtggtggatccgaggtgcagctggtcgagtctggaggaggattggtgcagcctggagggtcattgaaactctcatgtgcagcctctggattcaccttcaataagtacgccatgaactgggtccgccaggctccaggaaagggtttggaatgggttgctcgcataagaagtaaatataataattatgcaacatattatgccgattcagtgaaagacaggttcaccatctccagagatgattcaaaaaacactgcctatctacaaatgaacaacttgaaaactgaggacactgccgtgtactactgtgtgagacatgggaacttcggtaatagctacatatcctactgggcttactggggccaagggactctggtcaccgtctcctcaggtggtggtggttctggcggcggcggctccggtggtggtggttctcagactgttgtgactcaggaaccttcactcaccgtatcacctggtggaacagtcacactcacttgtggctcctcgactggggctgttacatctggcaactacccaaactgggtccaacaaaaaccaggtcaggcaccccgtggtctaataggtgggactaagttcctcgcccccggtactcctgccagattctcaggctccctgcttggaggcaaggctgccctcaccctctcaggggtacagccagaggatgaggcagaatattactgtgttctatggtacagcaaccgctgggtgttcggtggaggaaccaaactgactgtccta

SEQ ID NO: 1092 - protein, 113 aa, synthetic construct
  REGION 1..113: note = hEp 18-F12 L
DIVMTQTPLSLTVTPGEPVSISCKSSQSLLNSGNQKNYLTWYLQKPGQPPQLLIYWASTRESGVPDRFSGSGSGTDFTLTISRVEAEDVGVYYCQNDYSYPLTFGQGTKLEIK

SEQ ID NO: 1093 - protein, 17 aa, synthetic construct
  REGION 1..17: note = hEp 18-F12 LCDR1
KSSQSLLNSGNQKNYLT

SEQ ID NO: 1094 - protein, 7 aa, synthetic construct
  REGION 1..7: note = hEp 18-F12 LCDR2
WASTRES

SEQ ID NO: 1095 - protein, 9 aa, synthetic construct
  REGION 1..9: note = hEp 18-F12 LCDR3
QNDYSYPLT

SEQ ID NO: 1096 - DNA, 339 bp, synthetic construct
  misc_feature 1..339: note = hEp 18-F12 L
  source 1..339: mol_type = other DNA
gacatcgtgatgacacagactccactctccctgactgtgacaccaggagagccggtctctatcagctgcaagtccagtcagagtctgttaaacagtggaaatcaaaagaactacttgacctggtacctgcagaaaccagggcagcctcctcaactgttgatctactgggcatccactagggaatctggggtccctgatcgcttctcaggcagtggatctggaacagatttcactctcacaatcagccgtgtggaggctgaagacgtgggagtttattactgtcagaatgattatagttatccgctcacgttcggtcaagggaccaagcttgagatcaaa

SEQ ID NO: 1097 - protein, 119 aa, synthetic construct
  REGION 1..119: note = hEp 18-F12 H
QVQLVQSGAEVKKPGSSVKVSCKASGYTFSNYWLGWVRQRPGQGLEWIGDIFPGSGNIHYNEKFKGRATITADKSTSTAYMELSSLRSEDTAVYYCARLRNWDEPMDYWGQGTTVTVSS

SEQ ID NO: 1098 - protein, 5 aa, synthetic construct
  REGION 1..5: note = hEp 18-F12 HCDR1
NYWLG

SEQ ID NO: 1099 - protein, 17 aa, synthetic construct
  REGION 1..17: note = hEp 18-F12 HCDR2
DIFPGSGNIHYNEKFKG

SEQ ID NO: 1100 - protein, 10 aa, synthetic construct
  REGION 1..10: note = hEp 18-F12 HCDR3
LRNWDEPMDY

SEQ ID NO: 1101 - DNA, 357 bp, synthetic construct
  misc_feature 1..357: note = hEp 18-F12 L
  source 1..357: mol_type = other DNA
caggtgcagctggtccagtctggagctgaggtgaaaaagcctgggtcttcagtgaaggtatcctgcaaggcttctggatacaccttctctaactactggctaggttgggtaaggcagaggcctggacagggacttgagtggattggagatattttccctggaagtggtaatatccactacaatgagaagttcaagggcagagccacaatcactgcagacaaatctacgagcacagcctatatggaactcagtagcctgagatctgaggacactgctgtctattactgtgcaagactgaggaactgggacgagcctatggactactggggccaagggaccacggtcaccgtctcctcc

SEQ ID NO: 1102 - protein, 501 aa, synthetic construct
  REGION 1..501: note = hEp 18-F12 LH x I2C HL
DIVMTQTPLSLTVTPGEPVSISCKSSQSLLNSGNQKNYLTWYLQKPGQPPQLLIYWASTRESGVPDRFSGSGSGTDFTLTISRVEAEDVGVYYCQNDYSYPLTFGQGTKLEIKGGGGSGGGGSGGGGSQVQLVQSGAEVKKPGSSVKVSCKASGYTFSNYWLGWVRQRPGQGLEWIGDIFPGSGNIHYNEKFKGRATITADKSTSTAYMELSSLRSEDTAVYYCARLRNWDEPMDYWGQGTTVTVSSGGGGSEVQLVESGGGLVQPGGSLKLSCAASGFTFNKYAMNWVRQAPGKGLEWVARIRSKYNNYATYYADSVKDRFTISRDDSKNTAYLQMNNLKTEDTAVYYCVRHGNFGNSYISYWAYWGQGTLVTVSSGGGGSGGGGSGGGGSQTVVTQEPSLTVSPGGTVTLTCGSSTGAVTSGNYPNWVQQKPGQAPRGLIGGTKFLAPGTPARFSGSLLGGKAALTLSGVQPEDEAEYYCVLWYSNRWVFGGGTKLTVL

SEQ ID NO: 1103 - DNA, 1503 bp, synthetic construct
  misc_feature 1..1503: note = hEp 18-F12 LH x I2C HL
  source 1..1503: mol_type = other DNA
gacatcgtgatgacacagactccactctccctgactgtgacaccaggagagccggtctctatcagctgcaagtccagtcagagtctgttaaacagtggaaatcaaaagaactacttgacctggtacctgcagaaaccagggcagcctcctcaactgttgatctactgggcatccactagggaatctggggtccctgatcgcttctcaggcagtggatctggaacagatttcactctcacaatcagccgtgtggaggctgaagacgtgggagtttattactgtcagaatgattatagttatccgctcacgttcggtcaagggaccaagcttgagatcaaaggtggtggtggttctggcggcggcggctccggtggtggtggttctcaggtgcagctggtccagtctggagctgaggtgaaaaagcctgggtcttcagtgaaggtatcctgcaaggcttctggatacaccttctctaactactggctaggttgggtaaggcagaggcctggacagggacttgagtggattggagatattttccctggaagtggtaatatccactacaatgagaagttcaagggcagagccacaatcactgcagacaaatctacgagcacagcctatatggaactcagtagcctgagatctgaggacactgctgtctattactgtgcaagactgaggaactgggacgagcctatggactactggggccaagggaccacggtcaccgtctcctccggaggtggtggatccgaggtgcagctggtcgagtctggaggaggattggtgcagcctggagggtcattgaaactctcatgtgcagcctctggattcaccttcaataagtacgccatgaactgggtccgccaggctccaggaaagggtttggaatgggttgctcgcataagaagtaaatataataattatgcaacatattatgccgattcagtgaaagacaggttcaccatctccagagatgattcaaaaaacactgcctatctacaaatgaacaacttgaaaactgaggacactgccgtgtactactgtgtgagacatgggaacttcggtaatagctacatatcctactgggcttactggggccaagggactctggtcaccgtctcctcaggtggtggtggttctggcggcggcggctccggtggtggtggttctcagactgttgtgactcaggaaccttcactcaccgtatcacctggtggaacagtcacactcacttgtggctcctcgactggggctgttacatctggcaactacccaaactgggtccaacaaaaaccaggtcaggcaccccgtggtctaataggtgggactaagttcctcgcccccggtactcctgccagattctcaggctccctgcttggaggcaaggctgccctcaccctctcaggggtacagccagaggatgaggcagaatattactgtgttctatggtacagcaaccgctgggtgttcggtggaggaaccaaactgactgtccta

SEQ ID NO: 1104 - protein, 113 aa, synthetic construct
  REGION 1..113: note = hEp 18-G1 L
DIVMTQTPLSLTVTPGETVSISCKSSQSLLNSGNQKNYLTWYLQKPGQSPQLLIYWASTRESGVPDRFSGSGSGTDFTLTISSVEAEDVGVYYCQNDYSYPLTFGQGTKLEIK

SEQ ID NO: 1105 - protein, 17 aa, synthetic construct
  REGION 1..17: note = hEp 18-G1 LCDR1
KSSQSLLNSGNQKNYLT

SEQ ID NO: 1106 - protein, 7 aa, synthetic construct
  REGION 1..7: note = hEp 18-G1 LCDR2
WASTRES

SEQ ID NO: 1107 - protein, 9 aa, synthetic construct
  REGION 1..9: note = hEp 18-G1 LCDR3
QNDYSYPLT

SEQ ID NO: 1108 - DNA, 339 bp, synthetic construct
  misc_feature 1..339: note = hEp 18-G1 L
  source 1..339: mol_type = other DNA
gacatcgtgatgacacagactccactctccctgactgtgacaccaggagagacggtctctatcagctgcaagtccagtcagagtctgttaaacagtggaaatcaaaagaactacttgacctggtacctgcagaaaccagggcagtctcctcaactgttgatctactgggcatccactagggaatctggggtccctgatcgcttctcaggcagtggatctggaacagatttcactctcacaatcagcagtgtggaggctgaagacgtgggagtttattactgtcagaatgattatagttatccgctcacgttcggtcaagggaccaagcttgagatcaaa

SEQ ID NO: 1109 - protein, 119 aa, synthetic construct
  REGION 1..119: note = hEp 18-G1 H
QVQLVQSGAEVVKPGSSVKVSCKASGYTFSNYWLGWVRQTPGQGLEWIGDIFPGSGNIHYNEKFKGKVTITADKSTSTAYMELSSLGSEDTAVYYCARLRNWDEPMDYWGQGTTVTVSS

SEQ ID NO: 1110 - protein, 5 aa, synthetic construct
  REGION 1..5: note = hEp 18-G1 HCDR1
NYWLG

SEQ ID NO: 1111 - protein, 17 aa, synthetic construct
  REGION 1..17: note = hEp 18-G1 HCDR2
DIFPGSGNIHYNEKFKG

SEQ ID NO: 1112 - protein, 10 aa, synthetic construct
  REGION 1..10: note = hEp 18-G1 HCDR3
LRNWDEPMDY

SEQ ID NO: 1113 - DNA, 357 bp, synthetic construct
  misc_feature 1..357: note = hEp 18-G1 H
  source 1..357: mol_type = other DNA
caggtgcagctggtccagtctggagctgaggtggtaaagcctgggtcttcagtgaaggtatcctgcaaggcttctggatacaccttctctaactactggctaggttgggtaaggcagacgcctggacagggacttgagtggattggagatattttccctggaagtggtaatatccactacaatgagaagttcaagggcaaagtcacaatcactgcagacaaatctacgagcacagcctatatggaactcagtagcctgggatctgaggacactgctgtctattactgtgcaagactgaggaactgggacgagcctatggactactggggccaagggaccacggtcaccgtctcctcc

SEQ ID NO: 1114 - protein, 501 aa, synthetic construct
  REGION 1..501: note = hEp 18-G1 LH x I2C HL
DIVMTQTPLSLTVTPGETVSISCKSSQSLLNSGNQKNYLTWYLQKPGQSPQLLIYWASTRESGVPDRFSGSGSGTDFTLTISSVEAEDVGVYYCQNDYSYPLTFGQGTKLEIKGGGGSGGGGSGGGGSQVQLVQSGAEVVKPGSSVKVSCKASGYTFSNYWLGWVRQTPGQGLEWIGDIFPGSGNIHYNEKFKGKVTITADKSTSTAYMELSSLGSEDTAVYYCARLRNWDEPMDYWGQGTTVTVSSGGGGSEVQLVESGGGLVQPGGSLKLSCAASGFTFNKYAMNWVRQAPGKGLEWVARIRSKYNNYATYYADSVKDRFTISRDDSKNTAYLQMNNLKTEDTAVYYCVRHGNFGNSYISYWAYWGQGTLVTVSSGGGGSGGGGSGGGGSQTVVTQEPSLTVSPGGTVTLTCGSSTGAVTSGNYPNWVQQKPGQAPRGLIGGTKFLAPGTPARFSGSLLGGKAALTLSGVQPEDEAEYYCVLWYSNRWVFGGGTKLTVL

SEQ ID NO: 1115 - DNA, 1503 bp, synthetic construct
  misc_feature 1..1503: note = hEp 18-G1 LH x I2C HL
  source 1..1503: mol_type = other DNA
gacatcgtgatgacacagactccactctccctgactgtgacaccaggagagacggtctctatcagctgcaagtccagtcagagtctgttaaacagtggaaatcaaaagaactacttgacctggtacctgcagaaaccagggcagtctcctcaactgttgatctactgggcatccactagggaatctggggtccctgatcgcttctcaggcagtggatctggaacagatttcactctcacaatcagcagtgtggaggctgaagacgtgggagtttattactgtcagaatgattatagttatccgctcacgttcggtcaagggaccaagcttgagatcaaaggtggtggtggttctggcggcggcggctccggtggtggtggttctcaggtgcagctggtccagtctggagctgaggtggtaaagcctgggtcttcagtgaaggtatcctgcaaggcttctggatacaccttctctaactactggctaggttgggtaaggcagacgcctggacagggacttgagtggattggagatattttccctggaagtggtaatatccactacaatgagaagttcaagggcaaagtcacaatcactgcagacaaatctacgagcacagcctatatggaactcagtagcctgggatctgaggacactgctgtctattactgtgcaagactgaggaactgggacgagcctatggactactggggccaagggaccacggtcaccgtctcctccggaggtggtggatccgaggtgcagctggtcgagtctggaggaggattggtgcagcctggagggtcattgaaactctcatgtgcagcctctggattcaccttcaataagtacgccatgaactgggtccgccaggctccaggaaagggtttggaatgggttgctcgcataagaagtaaatataataattatgcaacatattatgccgattcagtgaaagacaggttcaccatctccagagatgattcaaaaaacactgcctatctacaaatgaacaacttgaaaactgaggacactgccgtgtactactgtgtgagacatgggaacttcggtaatagctacatatcctactgggcttactggggccaagggactctggtcaccgtctcctcaggtggtggtggttctggcggcggcggctccggtggtggtggttctcagactgttgtgactcaggaaccttcactcaccgtatcacctggtggaacagtcacactcacttgtggctcctcgactggggctgttacatctggcaactacccaaactgggtccaacaaaaaccaggtcaggcaccccgtggtctaataggtgggactaagttcctcgcccccggtactcctgccagattctcaggctccctgcttggaggcaaggctgccctcaccctctcaggggtacagccagaggatgaggcagaatattactgtgttctatggtacagcaaccgctgggtgttcggtggaggaaccaaactgactgtccta

SEQ ID NO: 1116 - protein, 113 aa, synthetic construct
  REGION 1..113: note = hEp 18-G9 L
DIVMTQTPLSLTVTPGEPVSISCKSSQSLLNSGNQKNYLTWYLQKPGQSPQLLIYWASTRESGVPDRFSGSGSGTDFTLKISRVEAEDVGVYYCQNDYSYPLTFGQGTKLEIK

SEQ ID NO: 1117 - protein, 17 aa, synthetic construct
  REGION 1..17: note = hEp 18-G9 LCDR1
KSSQSLLNSGNQKNYLT

SEQ ID NO: 1118 - protein, 7 aa, synthetic construct
  REGION 1..7: note = hEp 18-G9 LCDR2
WASTRES

SEQ ID NO: 1119 - protein, 9 aa, synthetic construct
  REGION 1..9: note = hEp 18-G9 LCDR3
QNDYSYPLT

SEQ ID NO: 1120 - DNA, 339 bp, synthetic construct
  misc_feature 1..339: note = hEp 18-G9 L
  source 1..339: mol_type = other DNA
gacatcgtgatgacacagactccactctccctgactgtgacaccaggagagccggtctctatcagctgcaagtccagtcagagtctgttaaacagtggaaatcaaaagaactacttgacctggtacctgcagaaaccagggcagtctcctcaactgttgatctactgggcatccactagggaatctggggtccctgatcgcttctcaggcagtggatctggaacagatttcactctcaaaatcagccgtgtggaggctgaagacgtgggagtttattactgtcagaatgattatagttatccgctcacgttcggtcaagggaccaagcttgagatcaaa

SEQ ID NO: 1121 - protein, 119 aa, synthetic construct
  REGION 1..119: note = hEp 18-G9 H
QVQLVQSGAEVKKPGSSVKVSCKASGYTFSNYWLGWVRQTPGQGLEWMGDIFPGSGNIHYNEKFKGRATITADKSTSTAYMELSSLTSEDTAVYYCARLRNWDEPMDYWGQGTTVTVSS

SEQ ID NO: 1122 - protein, 5 aa, synthetic construct
  REGION 1..5: note = hEp 18-G9 HCDR1
NYWLG

SEQ ID NO: 1123 - protein, 17 aa, synthetic construct
  REGION 1..17: note = hEp 18-G9 HCDR2
DIFPGSGNIHYNEKFKG

SEQ ID NO: 1124 - protein, 10 aa, synthetic construct
  REGION 1..10: note = hEp 18-G9 HCDR3
LRNWDEPMDY

SEQ ID NO: 1125 - DNA, 357 bp, synthetic construct
  misc_feature 1..357: note = hEp 18-G9 H
  source 1..357: mol_type = other DNA
caggtgcagctggtccagtctggagctgaggtgaaaaagcctgggtcttcagtgaaggtatcctgcaaggcttctggatacaccttctctaactactggctaggttgggtaaggcagacgcctggacagggacttgagtggatgggagatattttccctggaagtggtaatatccactacaatgagaagttcaagggcagagccacaatcactgcagacaaatctacgagcacagcctatatggaactcagtagcctgacatctgaggacactgctgtctattactgtgcaagactgaggaactgggacgagcctatggactactggggccaagggaccacggtcaccgtctcctcc

SEQ ID NO: 1126 - protein, 501 aa, synthetic construct
  REGION 1..501: note = hEp 18-G9 LH x I2C HL
DIVMTQTPLSLTVTPGEPVSISCKSSQSLLNSGNQKNYLTWYLQKPGQSPQLLIYWASTRESGVPDRFSGSGSGTDFTLKISRVEAEDVGVYYCQNDYSYPLTFGQGTKLEIKGGGGSGGGGSGGGGSQVQLVQSGAEVKKPGSSVKVSCKASGYTFSNYWLGWVRQTPGQGLEWMGDIFPGSGNIHYNEKFKGRATITADKSTSTAYMELSSLTSEDTAVYYCARLRNWDEPMDYWGQGTTVTVSSGGGGSEVQLVESGGGLVQPGGSLKLSCAASGFTFNKYAMNWVRQAPGKGLEWVARIRSKYNNYATYYADSVKDRFTISRDDSKNTAYLQMNNLKTEDTAVYYCVRHGNFGNSYISYWAYWGQGTLVTVSSGGGGSGGGGSGGGGSQTVVTQEPSLTVSPGGTVTLTCGSSTGAVTSGNYPNWVQQKPGQAPRGLIGGTKFLAPGTPARFSGSLLGGKAALTLSGVQPEDEAEYYCVLWYSNRWVFGGGTKLTVL

SEQ ID NO: 1127 - DNA, 1503 bp, synthetic construct
  misc_feature 1..1503: note = hEp 18-G9 LH x I2C HL
  source 1..1503: mol_type = other DNA
gacatcgtgatgacacagactccactctccctgactgtgacaccaggagagccggtctctatcagctgcaagtccagtcagagtctgttaaacagtggaaatcaaaagaactacttgacctggtacctgcagaaaccagggcagtctcctcaactgttgatctactgggcatccactagggaatctggggtccctgatcgcttctcaggcagtggatctggaacagatttcactctcaaaatcagccgtgtggaggctgaagacgtgggagtttattactgtcagaatgattatagttatccgctcacgttcggtcaagggaccaagcttgagatcaaaggtggtggtggttctggcggcggcggctccggtggtggtggttctcaggtgcagctggtccagtctggagctgaggtgaaaaagcctgggtcttcagtgaaggtatcctgcaaggcttctggatacaccttctctaactactggctaggttgggtaaggcagacgcctggacagggacttgagtggatgggagatattttccctggaagtggtaatatccactacaatgagaagttcaagggcagagccacaatcactgcagacaaatctacgagcacagcctatatggaactcagtagcctgacatctgaggacactgctgtctattactgtgcaagactgaggaactgggacgagcctatggactactggggccaagggaccacggtcaccgtctcctccggaggtggtggatccgaggtgcagctggtcgagtctggaggaggattggtgcagcctggagggtcattgaaactctcatgtgcagcctctggattcaccttcaataagtacgccatgaactgggtccgccaggctccaggaaagggtttggaatgggttgctcgcataagaagtaaatataataattatgcaacatattatgccgattcagtgaaagacaggttcaccatctccagagatgattcaaaaaacactgcctatctacaaatgaacaacttgaaaactgaggacactgccgtgtactactgtgtgagacatgggaacttcggtaatagctacatatcctactgggcttactggggccaagggactctggtcaccgtctcctcaggtggtggtggttctggcggcggcggctccggtggtggtggttctcagactgttgtgactcaggaaccttcactcaccgtatcacctggtggaacagtcacactcacttgtggctcctcgactggggctgttacatctggcaactacccaaactgggtccaacaaaaaccaggtcaggcaccccgtggtctaataggtgggactaagttcctcgcccccggtactcctgccagattctcaggctccctgcttggaggcaaggctgccctcaccctctcaggggtacagccagaggatgaggcagaatattactgtgttctatggtacagcaaccgctgggtgttcggtggaggaaccaaactgactgtccta

SEQ ID NO: 1128 - protein, 314 aa, Homo sapiens
MAPPQVLAFGLLLAAATATFAAAQEECVCENYKLAVNCFVNNNRQCQCTSVGAQNTVICSKLAAKCLVMKAEMNGSKLGRRAKPEGALQNNDGLYDPDCDESGLFKAKQCNGTSTCWCVNTAGVRRTDKDTEITCSERVRTYWIIIELKHKAREKPYDSKSLRTALQKEITTRYQLDPKFITSILYENNVITIDLVQNSSQKTQNDVDIADVAYYFEKDVKGESLFHSKKMDLTVNGEQLDLDPGQTLIYYVDEKAPEFSMQGLKAGVIAVIVVVVIAVVAGIVVLVISRKKRMAKYEKAEIKEMGEMHRELNA

SEQ ID NO: 1129 - DNA, 1528 bp, Homo sapiens
  source 1..1528: mol_type = genomic DNA
cggcgagcgagcaccttcgacgcggtccggggaccccctcgtcgctgtcctcccgacgcggacccgcgtgccccaggcctcgcgctgcccggccggctcctcgtgtcccactcccggcgcacgccctcccgcgagtcccgggcccctcccgcgcccctcttctcggcgcgcgcgcagcatggcgcccccgcaggtcctcgcgttcgggcttctgcttgccgcggcgacggcgacttttgccgcagctcaggaagaatgtgtctgtgaaaactacaagctggccgtaaactgctttgtgaataataatcgtcaatgccagtgtacttcagttggtgcacaaaatactgtcatttgctcaaagctggctgccaaatgtttggtgatgaaggcagaaatgaatggctcaaaacttgggagaagagcaaaacctgaaggggccctccagaacaatgatgggctttatgatcctgactgcgatgagagcgggctctttaaggccaagcagtgcaacggcacctccacgtgctggtgtgtgaacactgctggggtcagaagaacagacaaggacactgaaataacctgctctgagcgagtgagaacctactggatcatcattgaactaaaacacaaagcaagagaaaaaccttatgatagtaaaagtttgcggactgcacttcagaaggagatcacaacgcgttatcaactggatccaaaatttatcacgagtattttgtatgagaataatgttatcactattgatctggttcaaaattcttctcaaaaaactcagaatgatgtggacatagctgatgtggcttattattttgaaaaagatgttaaaggtgaatccttgtttcattctaagaaaatggacctgacagtaaatggggaacaactggatctggatcctggtcaaactttaatttattatgttgatgaaaaagcacctgaattctcaatgcagggtctaaaagctggtgttattgctgttattgtggttgtggtgatagcagttgttgctggaattgttgtgctggttatttccagaaagaagagaatggcaaagtatgagaaggctgagataaaggagatgggtgagatgcatagggaactcaatgcataactatataatttgaagattatagaagaagggaaatagcaaatggacacaaattacaaatgtgtgtgcgtgggacgaagacatctttgaaggtcatgagtttgttagtttaacatcatatatttgtaatagtgaaacctgtactcaaaatataagcagcttgaaactggctttaccaatcttgaaatttgaccacaagtgtcttatatatgcagatctaatgtaaaatccagaacttggactccatcgttaaaattatttatgtgtaacattcaaatgtgtgcattaaatatgcttccacagtaaaatctgaaaaactgatttgtgattgaaagctgcctttctatttacttgagtcttgtacatacatacttttttatgagctatgaaataaaacattttaaactg

SEQ ID NO: 1130 - protein, 36 aa, Homo sapiens
ECVCENYKLAVNCFVNNNRQCQCTSVGAQNTVICSK

SEQ ID NO: 1131 - protein, 113 aa, synthetic construct
  REGION 1..113: note = FAP L
DIVMTQSPDSLAVSLGERATINCKSSQSLLYSRNQKNYLAWYQQKPGQPPKLLIFWASTRESGVPDRFSGSGFGTDFTLTISSLQAEDVAVYYCQQYFSYPLTFGQGTKVEIK

SEQ ID NO: 1132 - protein, 17 aa, synthetic construct
  REGION 1..17: note = FAP L-CDR1
KSSQSLLYSRNQKNYLA

SEQ ID NO: 1133 - protein, 7 aa, synthetic construct
  REGION 1..7: note = FAP L-CDR2
WASTRES

SEQ ID NO: 1134 - protein, 9 aa, synthetic construct
  REGION 1..9: note = FAP L-CDR3
QQYFSYPLT

SEQ ID NO: 1135 - DNA, 339 bp, synthetic construct
  misc_feature 1..339: note = FAP L
  source 1..339: mol_type = other DNA
gacattgtgatgacccagtctccagactctttggctgtgtctctaggggagagggccaccatcaactgcaagtccagtcagagccttttatattctagaaatcaaaagaactacttggcctggtatcagcagaaaccaggacagccacccaaactcctcatcttttgggctagcactagggaatctggggtacctgataggttcagtggcagtgggtttgggacagacttcaccctcaccattagcagcctgcaggctgaagatgtggcagtttattactgtcagcaatattttagctatccgctcacgttcggacaagggaccaaggtggaaataaaa

SEQ ID NO: 1136 - protein, 124 aa, synthetic construct
  REGION 1..124: note = FAP H
QVQLVQSGAEVKKPGASVKVSCKTSRYTFTEYTIHWVRQAPGQRLEWIGGINPNNGIPNYNQKFKGRVTITVDTSASTAYMELSSLRSEDTAVYYCARRRIAYGYDEGHAMDYWGQGTLVTVSS

SEQ ID NO: 1137 - protein, 5 aa, synthetic construct
  REGION 1..5: note = FAP H-CDR1
EYTIH

SEQ ID NO: 1138 - protein, 17 aa, synthetic construct
  REGION 1..17: note = FAP H-CDR2
GINPNNGIPNYNQKFKG

SEQ ID NO: 1139 - protein, 15 aa, synthetic construct
  REGION 1..15: note = FAP H-CDR3
RRIAYGYDEGHAMDY

SEQ ID NO: 1140 - DNA, 372 bp, synthetic construct
  misc_feature 1..372: note = FAP H
  source 1..372: mol_type = other DNA
caggtgcaactagtgcagtccggcgccgaagtgaagaaacccggtgcttccgtgaaagtcagctgtaaaactagtagatacaccttcactgaatacaccatacactgggttagacaggcccctggccaaaggctggagtggataggaggtattaatcctaacaatggtattcctaactacaaccagaagttcaagggccgggtcaccatcaccgtagacacctctgccagcaccgcctacatggaactgtccagcctgcgctccgaggacactgcagtctactactgcgccagaagaagaatcgcctatggttacgacgagggccatgctatggactactggggtcaaggaacccttgtcaccgtctcctcc

SEQ ID NO: 1141 - protein, 252 aa, synthetic construct
  REGION 1..252: note = FAP LH
DIVMTQSPDSLAVSLGERATINCKSSQSLLYSRNQKNYLAWYQQKPGQPPKLLIFWASTRESGVPDRFSGSGFGTDFTLTISSLQAEDVAVYYCQQYFSYPLTFGQGTKVEIKGGGGSGGGGSGGGGSQVQLVQSGAEVKKPGASVKVSCKTSRYTFTEYTIHWVRQAPGQRLEWIGGINPNNGIPNYNQKFKGRVTITVDTSASTAYMELSSLRSEDTAVYYCARRRIAYGYDEGHAMDYWGQGTLVTVSS

SEQ ID NO: 1142 - DNA, 756 bp, synthetic construct
  misc_feature 1..756: note = FAP LH
  source 1..756: mol_type = other DNA
gacattgtgatgacccagtctccagactctttggctgtgtctctaggggagagggccaccatcaactgcaagtccagtcagagccttttatattctagaaatcaaaagaactacttggcctggtatcagcagaaaccaggacagccacccaaactcctcatcttttgggctagcactagggaatctggggtacctgataggttcagtggcagtgggtttgggacagacttcaccctcaccattagcagcctgcaggctgaagatgtggcagtttattactgtcagcaatattttagctatccgctcacgttcggacaagggaccaaggtggaaataaaaggtggtggtggttctggcggcggcggctccggtggtggtggttctcaggtgcaactagtgcagtccggcgccgaagtgaagaaacccggtgcttccgtgaaagtcagctgtaaaactagtagatacaccttcactgaatacaccatacactgggttagacaggcccctggccaaaggctggagtggataggaggtattaatcctaacaatggtattcctaactacaaccagaagttcaagggccgggtcaccatcaccgtagacacctctgccagcaccgcctacatggaactgtccagcctgcgctccgaggacactgcagtctactactgcgccagaagaagaatcgcctatggttacgacgagggccatgctatggactactggggtcaaggaacccttgtcaccgtctcctcc

SEQ ID NO: 1143 - protein, 506 aa, synthetic construct
  REGION 1..506: note = FAP LH x I2C HL
DIVMTQSPDSLAVSLGERATINCKSSQSLLYSRNQKNYLAWYQQKPGQPPKLLIFWASTRESGVPDRFSGSGFGTDFTLTISSLQAEDVAVYYCQQYFSYPLTFGQGTKVEIKGGGGSGGGGSGGGGSQVQLVQSGAEVKKPGASVKVSCKTSRYTFTEYTIHWVRQAPGQRLEWIGGINPNNGIPNYNQKFKGRVTITVDTSASTAYMELSSLRSEDTAVYYCARRRIAYGYDEGHAMDYWGQGTLVTVSSGGGGSEVQLVESGGGLVQPGGSLKLSCAASGFTFNKYAMNWVRQAPGKGLEWVARIRSKYNNYATYYADSVKDRFTISRDDSKNTAYLQMNNLKTEDTAVYYCVRHGNFGNSYISYWAYWGQGTLVTVSSGGGGSGGGGSGGGGSQTVVTQEPSLTVSPGGTVTLTCGSSTGAVTSGNYPNWVQQKPGQAPRGLIGGTKFLAPGTPARFSGSLLGGKAALTLSGVQPEDEAEYYCVLWYSNRWVFGGGTKLTVL

SEQ ID NO: 1144 - DNA, 1518 bp, synthetic construct
  misc_feature 1..1518: note = FAP LH x I2C HL
  source 1..1518: mol_type = other DNA
gacattgtgatgacccagtctccagactctttggctgtgtctctaggggagagggccaccatcaactgcaagtccagtcagagccttttatattctagaaatcaaaagaactacttggcctggtatcagcagaaaccaggacagccacccaaactcctcatcttttgggctagcactagggaatctggggtacctgataggttcagtggcagtgggtttgggacagacttcaccctcaccattagcagcctgcaggctgaagatgtggcagtttattactgtcagcaatattttagctatccgctcacgttcggacaagggaccaaggtggaaataaaaggtggtggtggttctggcggcggcggctccggtggtggtggttctcaggtgcaactagtgcagtccggcgccgaagtgaagaaacccggtgcttccgtgaaagtcagctgtaaaactagtagatacaccttcactgaatacaccatacactgggttagacaggcccctggccaaaggctggagtggataggaggtattaatcctaacaatggtattcctaactacaaccagaagttcaagggccgggtcaccatcaccgtagacacctctgccagcaccgcctacatggaactgtccagcctgcgctccgaggacactgcagtctactactgcgccagaagaagaatcgcctatggttacgacgagggccatgctatggactactggggtcaaggaacccttgtcaccgtctcctccggaggtggtggatccgaggtgcagctggtcgagtctggaggaggattggtgcagcctggagggtcattgaaactctcatgtgcagcctctggattcaccttcaataagtacgccatgaactgggtccgccaggctccaggaaagggtttggaatgggttgctcgcataagaagtaaatataataattatgcaacatattatgccgattcagtgaaagacaggttcaccatctccagagatgattcaaaaaacactgcctatctacaaatgaacaacttgaaaactgaggacactgccgtgtactactgtgtgagacatgggaacttcggtaatagctacatatcctactgggcttactggggccaagggactctggtcaccgtctcctcaggtggtggtggttctggcggcggcggctccggtggtggtggttctcagactgttgtgactcaggaaccttcactcaccgtatcacctggtggaacagtcacactcacttgtggctcctcgactggggctgttacatctggcaactacccaaactgggtccaacaaaaaccaggtcaggcaccccgtggtctaataggtgggactaagttcctcgcccccggtactcctgccagattctcaggctccctgcttggaggcaaggctgccctcaccctctcaggggtacagccagaggatgaggcagaatattactgtgttctatggtacagcaaccgctgggtgttcggtggaggaaccaaactgactgtccta

SEQ ID NO: 1145 - protein, 506 aa, synthetic construct
  REGION 1..506: note = FAP LH x H2C HL
DIVMTQSPDSLAVSLGERATINCKSSQSLLYSRNQKNYLAWYQQKPGQPPKLLIFWASTRESGVPDRFSGSGFGTDFTLTISSLQAEDVAVYYCQQYFSYPLTFGQGTKVEIKGGGGSGGGGSGGGGSQVQLVQSGAEVKKPGASVKVSCKTSRYTFTEYTIHWVRQAPGQRLEWIGGINPNNGIPNYNQKFKGRVTITVDTSASTAYMELSSLRSEDTAVYYCARRRIAYGYDEGHAMDYWGQGTLVTVSSGGGGSEVQLVESGGGLVQPGGSLKLSCAASGFTFNKYAMNWVRQAPGKGLEWVARIRSKYNNYATYYADSVKDRFTISRDDSKNTAYLQMNNLKTEDTAVYYCVRHGNFGNSYISYWAYWGQGTLVTVSSGGGGSGGGGSGGGGSQTVVTQEPSLTVSPGGTVTLTCGSSTGAVTSGYYPNWVQQKPGQAPRGLIGGTKFLAPGTPARFSGSLLGGKAALTLSGVQPEDEAEYYCALWYSNRWVFGGGTKLTVL

SEQ ID NO: 1146 - DNA, 1518 bp, synthetic construct
  misc_feature 1..1518: note = FAP LH x H2C HL
  source 1..1518: mol_type = other DNA
gacattgtgatgacccagtctccagactctttggctgtgtctctaggggagagggccaccatcaactgcaagtccagtcagagccttttatattctagaaatcaaaagaactacttggcctggtatcagcagaaaccaggacagccacccaaactcctcatcttttgggctagcactagggaatctggggtacctgataggttcagtggcagtgggtttgggacagacttcaccctcaccattagcagcctgcaggctgaagatgtggcagtttattactgtcagcaatattttagctatccgctcacgttcggacaagggaccaaggtggaaataaaaggtggtggtggttctggcggcggcggctccggtggtggtggttctcaggtgcaactagtgcagtccggcgccgaagtgaagaaacccggtgcttccgtgaaagtcagctgtaaaactagtagatacaccttcactgaatacaccatacactgggttagacaggcccctggccaaaggctggagtggataggaggtattaatcctaacaatggtattcctaactacaaccagaagttcaagggccgggtcaccatcaccgtagacacctctgccagcaccgcctacatggaactgtccagcctgcgctccgaggacactgcagtctactactgcgccagaagaagaatcgcctatggttacgacgagggccatgctatggactactggggtcaaggaacccttgtcaccgtctcctccggaggtggtggatccgaggtgcagctggtcgagtctggaggaggattggtgcagcctggagggtcattgaaactctcatgtgcagcctctggattcaccttcaataagtacgccatgaactgggtccgccaggctccaggaaagggtttggaatgggttgctcgcataagaagtaaatataataattatgcaacatattatgccgattcagtgaaagacaggttcaccatctccagagatgattcaaaaaacactgcctatctacaaatgaacaacttgaaaactgaggacactgccgtgtactactgtgtgagacatgggaacttcggtaatagctacatatcctactgggcttactggggccaagggactctggtcaccgtctcctcaggtggtggtggttctggcggcggcggctccggtggtggtggttctcagactgttgtgactcaggaaccttcactcaccgtatcacctggtggaacagtcacactcacttgtggctcctcgactggggctgttacatctggctactacccaaactgggtccaacaaaaaccaggtcaggcaccccgtggtctaataggtgggactaagttcctcgcccccggtactcctgccagattctcaggctccctgcttggaggcaaggctgccctcaccctctcaggggtacagccagaggatgaggcagaatattactgtgctctatggtacagcaaccgctgggtgttcggtggaggaaccaaactgactgtccta

SEQ ID NO: 1147 - protein, 506 aa, synthetic construct
  REGION 1..506: note = FAP LH x F12Q HL
DIVMTQSPDSLAVSLGERATINCKSSQSLLYSRNQKNYLAWYQQKPGQPPKLLIFWASTRESGVPDRFSGSGFGTDFTLTISSLQAEDVAVYYCQQYFSYPLTFGQGTKVEIKGGGGSGGGGSGGGGSQVQLVQSGAEVKKPGASVKVSCKTSRYTFTEYTIHWVRQAPGQRLEWIGGINPNNGIPNYNQKFKGRVTITVDTSASTAYMELSSLRSEDTAVYYCARRRIAYGYDEGHAMDYWGQGTLVTVSSGGGGSEVQLVESGGGLVQPGGSLKLSCAASGFTFNSYAMNWVRQAPGKGLEWVARIRSKYNNYATYYADSVKGRFTISRDDSKNTAYLQMNNLKTEDTAVYYCVRHGNFGNSYVSWWAYWGQGTLVTVSSGGGGSGGGGSGGGGSQTVVTQEPSLTVSPGGTVTLTCGSSTGAVTSGNYPNWVQQKPGQAPRGLIGGTKFLAPGTPARFSGSLLGGKAALTLSGVQPEDEAEYYCVLWYSNRWVFGGGTKLTVL

SEQ ID NO: 1148 - DNA, 1518 bp, synthetic construct
  misc_feature 1..1518: note = FAP LH x F12Q HL
  source 1..1518: mol_type = other DNA
gacattgtgatgacccagtctccagactctttggctgtgtctctaggggagagggccaccatcaactgcaagtccagtcagagccttttatattctagaaatcaaaagaactacttggcctggtatcagcagaaaccaggacagccacccaaactcctcatcttttgggctagcactagggaatctggggtacctgataggttcagtggcagtgggtttgggacagacttcaccctcaccattagcagcctgcaggctgaagatgtggcagtttattactgtcagcaatattttagctatccgctcacgttcggacaagggaccaaggtggaaataaaaggtggtggtggttctggcggcggcggctccggtggtggtggttctcaggtgcaactagtgcagtccggcgccgaagtgaagaaacccggtgcttccgtgaaagtcagctgtaaaactagtagatacaccttcactgaatacaccatacactgggttagacaggcccctggccaaaggctggagtggataggaggtattaatcctaacaatggtattcctaactacaaccagaagttcaagggccgggtcaccatcaccgtagacacctctgccagcaccgcctacatggaactgtccagcctgcgctccgaggacactgcagtctactactgcgccagaagaagaatcgcctatggttacgacgagggccatgctatggactactggggtcaaggaacccttgtcaccgtctcctccggaggtggtggatccgaggtgcagctggtcgagtctggaggaggattggtgcagcctggagggtcattgaaactctcatgtgcagcctctggattcaccttcaatagctacgccatgaactgggtccgccaggctccaggaaagggtttggaatgggttgctcgcataagaagtaaatataataattatgcaacatattatgccgattcagtgaaaggcaggttcaccatctccagagatgattcaaaaaacactgcctatctacaaatgaacaacttgaaaactgaggacactgccgtgtactactgtgtgagacatgggaacttcggtaatagctacgtttcctggtgggcttactggggccaagggactctggtcaccgtctcctcaggtggtggtggttctggcggcggcggctccggtggtggtggttctcagactgttgtgactcaggaaccttcactcaccgtatcacctggtggaacagtcacactcacttgtggctcctcgactggggctgttacatctggcaactacccaaactgggtccaacaaaaaccaggtcaggcaccccgtggtctaataggtgggactaagttcctcgcccccggtactcctgccagattctcaggctccctgcttggaggcaaggctgccctcaccctctcaggggtacagccagaggatgaggcagaatattactgtgttctatggtacagcaaccgctgggtgttcggtggaggaaccaaactgactgtccta

SEQ ID NO: 1149 - DNA, 2283 bp, synthetic construct
  misc_feature 1..2283: note = FAP alpha
  source 1..2283: mol_type = other DNA
atgaagacttgggtaaaaatcgtatttggagttgccacctctgctgtgcttgccttattggtgatgtgcattgtcttacgcccttcaagagttcataactctgaagaaaatacaatgagagcactcacactgaaggatattttaaatggaacattttcttataaaacattttttccaaactggatttcaggacaagaatatcttcatcaatctgcagataacaatatagtactttataatattgaaacaggacaatcatataccattttgagtaatagaaccatgaaaagtgtgaatgcttcaaattacggcttatcacctgatcggcaatttgtatatctagaaagtgattattcaaagctttggagatactcttacacagcaacatattacatctatgaccttagcaatggagaatttgtaagaggaaatgagcttcctcgtccaattcagtatttatgctggtcgcctgttgggagtaaattagcatatgtctatcaaaacaatatctatttgaaacaaagaccaggagatccaccttttcaaataacatttaatggaagagaaaataaaatatttaatggaatcccagactgggtttatgaagaggaaatgcttgctacaaaatatgctctctggtggtctcctaatggaaaatttttggcatatgcggaatttaatgatacggatataccagttattgcctattcctattatggcgatgaacaatatcctagaacaataaatattccatacccaaaggctggagctaagaatcccgttgttcggatatttattatcgataccacttaccctgcgtatgtaggtccccaggaagtgcctgttccagcaatgatagcctcaagtgattattatttcagttggctcacgtgggttactgatgaacgagtatgtttgcagtggctaaaaagagtccagaatgtttcggtcctgtctatatgtgacttcagggaagactggcagacatgggattgtccaaagacccaggagcatatagaagaaagcagaactggatgggctggtggattctttgtttcaacaccagttttcagctatgatgccatttcgtactacaaaatatttagtgacaaggatggctacaaacatattcactatatcaaagacactgtggaaaatgctattcaaattacaagtggcaagtgggaggccataaatatattcagagtaacacaggattcactgttttattctagcaatgaatttgaagaataccctggaagaagaaacatctacagaattagcattggaagctatcctccaagcaagaagtgtgttacttgccatctaaggaaagaaaggtgccaatattacacagcaagtttcagcgactacgccaagtactatgcacttgtctgctacggcccaggcatccccatttccacccttcatgatggacgcactgatcaagaaattaaaatcctggaagaaaacaaggaattggaaaatgctttgaaaaatatccagctgcctaaagaggaaattaagaaacttgaagtagatgaaattactttatggtacaagatgattcttcctcctcaatttgacagatcaaagaagtatcccttgctaattcaagtgtatggtggtccctgcagtcagagtgtaaggtctgtatttgctgttaattggatatcttatcttgcaagtaaggaagggatggtcattgccttggtggatggtcgaggaacagctttccaaggtgacaaactcctctatgcagtgtatcgaaagctgggtgtttatgaagttgaagaccagattacagctgtcagaaaattcatagaaatgggtttcattgatgaaaaaagaatagccatatggggctggtcctatggaggatacgtttcatcactggcccttgcatctggaactggtcttttcaaatgtggtatagcagtggctccagtctccagctgggaatattacgcgtctgtctacacagagagattcatgggtctcccaacaaaggatgataatcttgagcactataagaattcaactgtgatggcaagagcagaatatttcagaaatgtagactatcttctcatccacggaacagcagatgataatgtgcactttcaaaactcagcacagattgctaaagctctggttaatgcacaagtggatttccaggcaatgtggtactctgaccagaaccacggcttatccggcctgtccacgaaccacttatacacccacatgacccacttcctaaagcagtgtttctctttgtcagactaa

SEQ ID NO: 1150 - protein, 760 aa, synthetic construct
  REGION 1..760: note = FAP alpha
MKTWVKIVFGVATSAVLALLVMCIVLRPSRVHNSEENTMRALTLKDILNGTFSYKTFFPNWISGQEYLHQSADNNIVLYNIETGQSYTILSNRTMKSVNASNYGLSPDRQFVYLESDYSKLWRYSYTATYYIYDLSNGEFVRGNELPRPIQYLCWSPVGSKLAYVYQNNIYLKQRPGDPPFQITFNGRENKIFNGIPDWVYEEEMLATKYALWWSPNGKFLAYAEFNDTDIPVIAYSYYGDEQYPRTINIPYPKAGAKNPVVRIFIIDTTYPAYVGPQEVPVPAMIASSDYYFSWLTWVTDERVCLQWLKRVQNVSVLSICDFREDWQTWDCPKTQEHIEESRTGWAGGFFVSTPVFSYDAISYYKIFSDKDGYKHIHYIKDTVENAIQITSGKWEAINIFRVTQDSLFYSSNEFEEYPGRRNIYRISIGSYPPSKKCVTCHLRKERCQYYTASFSDYAKYYALVCYGPGIPISTLHDGRTDQEIKILEENKELENALKNIQLPKEEIKKLEVDEITLWYKMILPPQFDRSKKYPLLIQVYGGPCSQSVRSVFAVNWISYLASKEGMVIALVDGRGTAFQGDKLLYAVYRKLGVYEVEDQITAVRKFIEMGFIDEKRIAIWGWSYGGYVSSLALASGTGLFKCGIAVAPVSSWEYYASVYTERFMGLPTKDDNLEHYKNSTVMARAEYFRNVDYLLIHGTADDNVHFQNSAQIAKALVNAQVDFQAMWYSDQNHGLSGLSTNHLYTHMTHFLKQCFSLSD

SEQ ID NO: 1151 - DNA, 2283 bp, Macaca fascicularis
  source 1..2283: mol_type = genomic DNA
atgaagacttgggtaaaaatcgtatttggagttgccacctctgctgtgcttgccttattggtgatgtgcattgtcttacgccctccaagagttcataactctgaagaaaatacaatgagagcactcacactgaaggatattttaaatgggacattttcttataaaacattttttccaaactggatttcaggacaagaatatcttcatcaatctgcagataacaatatagtactttataatattgaaacaggacaatcatataccattttgagtaacagaaccatgaaaagtgtgaatgcttcaaattatggcttatcacctgatcggcaatttgtatatctagaaagtgattattcaaagctttggagatactcttacacagcaacatattacatctatgaccttagcaatggagaatttgtaagaggaaatgagcttcctcgtccaattcagtatttatgctggtcgcctgttgggagtaaattagcatatgtctatcaaaacaatatctatttgaaacaaagaccaggagatccaccttttcaaataacatttaatggaagagaaaataaaatatttaatggaatcccagactgggtttatgaagaggaaatgcttgctacaaaatatgctctctggtggtctcctaatggaaaatttttggcatatgcggaatttaatgatacagatataccagttattgcctattcctattatggcgatgaacaatatcccagaacaataaatattccatacccaaaggcyggagctaagaatccttttgttcggatatttattatcgataccacttaccctgcgtatgtaggtccccaggaagtgcctgttccagcaatgatagcctcaagtgattattatttcagttggctcacgtgggttactgatgaacgagtatgtttgcagtggctaaaaagagtccagaatgtttcggtcttgtctatatgtgatttcagggaagactggcagacatgggattgtccaaagacccaggagcatatagaagaaagcagaactggatgggctggtggattctttgtttcaacaccagttttcagctatgatgccatttcatactacaaaatatttagtgacaaggatggctacaaacatattcactatatcaaagacactgtggaaaatgctattcaaattacaagtggcaagtgggaggccataaatatattcagagtaacacaggattcactgttttattctagcaatgaatttgaagattaccctggaagaagaaacatctacagaattagcattggaagctatcctccaagcaagaagtgtgttacttgccatctaaggaaagaaaggtgccaatattacacagcaagtttcagcgactacgccaagtactatgcacttgtctgctatggcccaggcatccccatttccacccttcatgacggacgcactgatcaagaaattaaaatcctggaagaaaacaaggaattggaaaatgctttgaaaaatatccagctgcctaaagaggaaattaagaaacttgaagtagatgaaattactttatggtacaagatgattcttcctcctcaatttgacagatcaaagaagtatcccttgctaattcaagtgtatggtggtccctgcagtcagagtgtraggtctgtatttgctgttaattggatatcktatcttgcaagtaaggaagggatggtcattgccttggtggatggtcgaggaacagctttccaaggtgacaaactcctgtatgcagtgtatcgaaagctgggtgtttatgaagttgaagaccagattacagctgtcagaaaattcatagaaatgggtttcattgatgaaaaaagaatagccatatggggctggtcctatggaggataygtttcatcactggcccttgcatctggaactggtcttttcaaatgtgggatagcagtggctccagtctccagctgggaatattacgcgtctgtctacacagaaagattcatgggtcttcccacaaaggatgataatcttgagcactacaaaaattcaactgtgatggcaagagcagaatatttcagaaatgtagactatcttctcatccacggaacagcagatgataatgtgcactttcaaaactcagcacagattgctaaagctctggttaatgcacaagtggatttccaggcaatgtggtactctgaccagaaccacggcttatccggcctgtccacgaaccacttatacacccacatgacccactttctaaagcagtgtttttctttgtcggactaa

SEQ ID NO: 1152 - protein, 760 aa, Macaca fascicularis
MKTWVKIVFGVATSAVLALLVMCIVLRPPRVHNSEENTMRALTLKDILNGTFSYKTFFPNWISGQEYLHQSADNNIVLYNIETGQSYTILSNRTMKSVNASNYGLSPDRQFVYLESDYSKLWRYSYTATYYIYDLSNGEFVRGNELPRPIQYLCWSPVGSKLAYVYQNNIYLKQRPGDPPFQITFNGRENKIFNGIPDWVYEEEMLATKYALWWSPNGKFLAYAEFNDTDIPVIAYSYYGDEQYPRTINIPYPKAGAKNPFVRIFIIDTTYPAYVGPQEVPVPAMIASSDYYFSWLTWVTDERVCLQWLKRVQNVSVLSICDFREDWQTWDCPKTQEHIEESRTGWAGGFFVSTPVFSYDAISYYKIFSDKDGYKHIHYIKDTVENAIQITSGKWEAINIFRVTQDSLFYSSNEFEDYPGRRNIYRISIGSYPPSKKCVTCHLRKERCQYYTASFSDYAKYYALVCYGPGIPISTLHDGRTDQEIKILEENKELENALKNIQLPKEEIKKLEVDEITLWYKMILPPQFDRSKKYPLLIQVYGGPCSQSVRSVFAVNWISYLASKEGMVIALVDGRGTAFQGDKLLYAVYRKLGVYEVEDQITAVRKFIEMGFIDEKRIAIWGWSYGGYVSSLALASGTGLFKCGIAVAPVSSWEYYASVYTERFMGLPTKDDNLEHYKNSTVMARAEYFRNVDYLLIHGTADDNVHFQNSAQIAKALVNAQVDFQAMWYSDQNHGLSGLSTNHLYTHMTHFLKQCFSLSD

SEQ ID NO: 1153 - DNA, 24 bp, synthetic construct
  misc_feature 1..24: note = forward primer
  source 1..24: mol_type = other DNA
cagcttccaactacaaagacagac

SEQ ID NO: 1154 - DNA, 25 bp, synthetic construct
  misc_feature 1..25: note = reverse primer
  source 1..25: mol_type = other DNA
tttcctcttcataaacccagtctgg

SEQ ID NO: 1155 - DNA, 26 bp, synthetic construct
  misc_feature 1..26: note = forward primer
  source 1..26: mol_type = other DNA
ttgaaacaaagaccaggagatccacc

SEQ ID NO: 1156 - DNA, 25 bp, synthetic construct
  misc_feature 1..25: note = reverse primer
  source 1..25: mol_type = other DNA
agatggcaagtaacacacttcttgc

SEQ ID NO: 1157 - DNA, 28 bp, synthetic construct
  misc_feature 1..28: note = forward primer
  source 1..28: mol_type = other DNA
gaagaaacatctacagaattagcattgg

SEQ ID NO: 1158 - DNA, 28 bp, synthetic construct
  misc_feature 1..28: note = reverse primer
  source 1..28: mol_type = other DNA
cacatttgaaaagaccagttccagatgc

SEQ ID NO: 1159 - DNA, 33 bp, synthetic construct
  misc_feature 1..33: note = forward primer
  source 1..33: mol_type = other DNA
agattacagctgtcagaaaattcatagaaatgg

SEQ ID NO: 1160 - DNA, 29 bp, synthetic construct
  misc_feature 1..29: note = reverse primer
  source 1..29: mol_type = other DNA
atataaggttttcagattctgatacaggc

SEQ ID NO: 1161 - DNA, 51 bp, synthetic construct
  misc_feature 1..51: note = 5'FAP-VH-A-XhoI
  source 1..51: mol_type = other DNA
ccgctactcgagtctggasctgagstgrwgaagcctggggcttcagtaaag

SEQ ID NO: 1162 - DNA, 75 bp, synthetic construct
  misc_feature 1..75: note = 3'FAP-VH-B
  source 1..75: mol_type = other DNA
ctgtctcacccagtgtatggtgtattcagtgaatgtgtatcyagaagycttgcaggacayctttactgaagcccc

SEQ ID NO: 1163 - DNA, 75 bp, synthetic construct
  misc_feature 1..75: note = 5'FAP-VH-C
  source 1..75: mol_type = other DNA
cactgggtgagacagkcccmtggamagagmcttgagtggatkggaggtattaatcctaacaatggtattcctaac

SEQ ID NO: 1164 - DNA, 78 bp, synthetic construct
  misc_feature 1..78: note = 3'FAP-VH-D
  source 1..78: mol_type = other DNA
catgtaggcggtgctggmggacktgyctmyagttawtgtgrccctgcccttgaacttctgattgtagttaggaatacc

SEQ ID NO: 1165 - DNA, 78 bp, synthetic construct
  misc_feature 1..78: note = 5'FAP-VH-E
  source 1..78: mol_type = other DNA
agcaccgcctacatggagctcmgcagcctgasatctgaggatactgcggtctattwctgtgcaagaagaagaatcgcc

SEQ ID NO: 1166 - DNA, 84 bp, synthetic construct
  misc_feature 1..84: note = 3'FAP-VH-F-BstEII
  source 1..84: mol_type = other DNA
ccagtaggtgaccagggttccttgaccccagtagtccatagcatggccctcgtcgtaaccataggcgattcttcttcttgcaca

SEQ ID NO: 1167 - DNA, 87 bp, synthetic construct
  misc_feature 1..87: note = 5'FAP-VL-A-SacI
  source 1..87: mol_type = other DNA
cgacctgagctcgtgatgacacagactccayyctccctasctgtgacasytggagagmmggyttctatsagctgcaagtccagtcag

SEQ ID NO: 1168 - DNA, 84 bp, synthetic construct
  misc_feature 1..84: note = 3'FAP-VL-B
  source 1..84: mol_type = other DNA
agactgccctggcttctgcwggwaccaggccaagtagttcttttgattacgactatataaaaggctctgactggacttgcagct

SEQ ID NO: 1169 - DNA, 87 bp, synthetic construct
  misc_feature 1..87: note = 5'FAP-VL-C
  source 1..87: mol_type = other DNA
cagaagccagggcagtctcctmaactgctgatttwctgggcatccactagggaatctggggtccctgatcgcttctcaggcagtgga

SEQ ID NO: 1170 - DNA, 90 bp, synthetic construct
  misc_feature 1..90: note = 3'FAP-VL-D
  source 1..90: mol_type = other DNA
atattgctgacagtmataaactsccasgtcctcagcctscacwctgctgatcktgagaktgaaatccgtcccaratccactgcctgagaa

SEQ ID NO: 1171 - DNA, 80 bp, synthetic construct
  misc_feature 1..80: note = 3'FAP-VL-E-BsiWI/SpeI
  source 1..80: mol_type = other DNA
ccagtaactagtcgtacgtttgatctccaccttggtcccaccaccgaacgtgagcggatagctaaaatattgctgacagt

SEQ ID NO: 1172 - protein, 117 aa, synthetic construct
  REGION 1..117: note = PC32B8-H
EVQLVQSGAEVKKPGATVKISCKVSGYTFTNYWLNWVKQAPGRGLEWIGRIDPSDSEIHYDQKFKDRVTITADKSTNTAYIELSSLRSEDTAVYYCALTGIYAMAYWGQGTTVTVSS

SEQ ID NO: 1173 - protein, 5 aa, synthetic construct
  REGION 1..5: note = PC32B8-HCDR1
NYWLN

SEQ ID NO: 1174 - protein, 17 aa, synthetic construct
  REGION 1..17: note = PC32B8-HCDR2
RIDPSDSEIHYDQKFKD

SEQ ID NO: 1175 - protein, 8 aa, synthetic construct
  REGION 1..8: note = PC32B8-HCDR3
TGIYAMAY

SEQ ID NO: 1176 - DNA, 351 bp, synthetic construct
  misc_feature 1..351: note = PC32B8-H
  source 1..351: mol_type = other DNA
gaggtgcagctggtccagtcaggcgccgaagtgaagaagcctggcgccacagtgaagatatcctgcaaggtcagcggctacaccttcaccaactactggctgaactgggtgaaacaggcgcccggcaggggcctggaatggataggcaggatcgaccccagcgacagcgagatccactacgaccagaagttcaaggacagagtcaccataaccgcggacaagagcaccaacaccgcctacatcgagctgtccagcctgagaagcgaggacaccgccgtgtactattgcgccctgaccggcatctacgccatggcctactggggccagggcaccacggtcaccgtctcctca

SEQ ID NO: 1177 - protein, 112 aa, synthetic construct
  REGION 1..112: note = PC32B8-L
DIVMTQSPPSLPVTPGEPASISCRSSKSLLHSNGNTYLYWYLQKPGQSPQLLIYRMSNLASGVPDRFSGSGSGTDFTLKISRVEAEDVGVYYCLQHLEYPYTFGQGTKLEIK

SEQ ID NO: 1178 - protein, 16 aa, synthetic construct
  REGION 1..16: note = PC32B8-LCDR1
RSSKSLLHSNGNTYLY

SEQ ID NO: 1179 - protein, 7 aa, synthetic construct
  REGION 1..7: note = PC32B8-LCDR2
RMSNLAS

SEQ ID NO: 1180 - protein, 9 aa, synthetic construct
  REGION 1..9: note = PC32B8-LCDR3
LQHLEYPYT

SEQ ID NO: 1181 - DNA, 336 bp, synthetic construct
  misc_feature 1..336: note = PC32B8-L
  source 1..336: mol_type = other DNA
gacatcgtgatgacccagtcacctccaagcctgccagtgaccccaggcgagccagcgtccatcagctgcaggtccagcaagagcctgctgcacagcaacggcaacacctacctgtactggtatctgcagaagccaggccagagcccccagctgctgatctacaggatgagcaacctggctagcggcgtgccagacagattcagcggcagcggctctggaaccgacttcaccctgaagatcagcagggtggaggccgaggacgtgggcgtgtactactgcctgcagcacctggaatacccctacaccttcggccaagggaccaagctggaaatcaag

SEQ ID NO: 1182 - protein, 244 aa, synthetic construct
  REGION 1..244: note = PC32B8-HL
EVQLVQSGAEVKKPGATVKISCKVSGYTFTNYWLNWVKQAPGRGLEWIGRIDPSDSEIHYDQKFKDRVTITADKSTNTAYIELSSLRSEDTAVYYCALTGIYAMAYWGQGTTVTVSSGGGGSGGGGSGGGGSDIVMTQSPPSLPVTPGEPASISCRSSKSLLHSNGNTYLYWYLQKPGQSPQLLIYRMSNLASGVPDRFSGSGSGTDFTLKISRVEAEDVGVYYCLQHLEYPYTFGQGTKLEIK

SEQ ID NO: 1183 - DNA, 732 bp, synthetic construct
  misc_feature 1..732: note = PC32B8-HL
  source 1..732: mol_type = other DNA
gaggtgcagctggtccagtcaggcgccgaagtgaagaagcctggcgccacagtgaagatatcctgcaaggtcagcggctacaccttcaccaactactggctgaactgggtgaaacaggcgcccggcaggggcctggaatggataggcaggatcgaccccagcgacagcgagatccactacgaccagaagttcaaggacagagtcaccataaccgcggacaagagcaccaacaccgcctacatcgagctgtccagcctgagaagcgaggacaccgccgtgtactattgcgccctgaccggcatctacgccatggcctactggggccagggcaccacggtcaccgtctcctcaggtggtggtggttctggcggcggcggctccggtggtggtggttctgacatcgtgatgacccagtcacctccaagcctgccagtgaccccaggcgagccagcgtccatcagctgcaggtccagcaagagcctgctgcacagcaacggcaacacctacctgtactggtatctgcagaagccaggccagagcccccagctgctgatctacaggatgagcaacctggctagcggcgtgccagacagattcagcggcagcggctctggaaccgacttcaccctgaagatcagcagggtggaggccgaggacgtgggcgtgtactactgcctgcagcacctggaatacccctacaccttcggccaagggaccaagctggaaatcaag

SEQ ID NO: 1184 - protein, 499 aa, synthetic construct
  REGION 1..499: note = PC32B8 HL x I2C HL
EVQLVQSGAEVKKPGATVKISCKVSGYTFTNYWLNWVKQAPGRGLEWIGRIDPSDSEIHYDQKFKDRVTITADKSTNTAYIELSSLRSEDTAVYYCALTGIYAMAYWGQGTTVTVSSGGGGSGGGGSGGGGSDIVMTQSPPSLPVTPGEPASISCRSSKSLLHSNGNTYLYWYLQKPGQSPQLLIYRMSNLASGVPDRFSGSGSGTDFTLKISRVEAEDVGVYYCLQHLEYPYTFGQGTKLEIKSGGGGSEVQLVESGGGLVQPGGSLKLSCAASGFTFNKYAMNWVRQAPGKGLEWVARIRSKYNNYATYYADSVKDRFTISRDDSKNTAYLQMNNLKTEDTAVYYCVRHGNFGNSYISYWAYWGQGTLVTVSSGGGGSGGGGSGGGGSQTVVTQEPSLTVSPGGTVTLTCGSSTGAVTSGNYPNWVQQKPGQAPRGLIGGTKFLAPGTPARFSGSLLGGKAALTLSGVQPEDEAEYYCVLWYSNRWVFGGGTKLTVL

SEQ ID NO: 1185 - DNA, 1497 bp, synthetic construct
  misc_feature 1..1497: note = PC32B8 HL x I2C HL
  source 1..1497: mol_type = other DNA
gaggtgcagctggtccagtcaggcgccgaagtgaagaagcctggcgccacagtgaagatatcctgcaaggtcagcggctacaccttcaccaactactggctgaactgggtgaaacaggcgcccggcaggggcctggaatggataggcaggatcgaccccagcgacagcgagatccactacgaccagaagttcaaggacagagtcaccataaccgcggacaagagcaccaacaccgcctacatcgagctgtccagcctgagaagcgaggacaccgccgtgtactattgcgccctgaccggcatctacgccatggcctactggggccagggcaccacggtcaccgtctcctcaggtggtggtggttctggcggcggcggctccggtggtggtggttctgacatcgtgatgacccagtcacctccaagcctgccagtgaccccaggcgagccagcgtccatcagctgcaggtccagcaagagcctgctgcacagcaacggcaacacctacctgtactggtatctgcagaagccaggccagagcccccagctgctgatctacaggatgagcaacctggctagcggcgtgccagacagattcagcggcagcggctctggaaccgacttcaccctgaagatcagcagggtggaggccgaggacgtgggcgtgtactactgcctgcagcacctggaatacccctacaccttcggccaagggaccaagctggaaatcaagtccggaggtggtggatccgaggtgcagctggtcgagtctggaggaggattggtgcagcctggagggtcattgaaactctcatgtgcagcctctggattcaccttcaataagtacgccatgaactgggtccgccaggctccaggaaagggtttggaatgggttgctcgcataagaagtaaatataataattatgcaacatattatgccgattcagtgaaagacaggttcaccatctccagagatgattcaaaaaacactgcctatctacaaatgaacaacttgaaaactgaggacactgccgtgtactactgtgtgagacatgggaacttcggtaatagctacatatcctactgggcttactggggccaagggactctggtcaccgtctcctcaggtggtggtggttctggcggcggcggctccggtggtggtggttctcagactgttgtgactcaggaaccttcactcaccgtatcacctggtggaacagtcacactcacttgtggctcctcgactggggctgttacatctggcaactacccaaactgggtccaacaaaaaccaggtcaggcaccccgtggtctaataggtgggactaagttcctcgcccccggtactcctgccagattctcaggctccctgcttggaggcaaggctgccctcaccctctcaggggtacagccagaggatgaggcagaatattactgtgttctatggtacagcaaccgctgggtgttcggtggaggaaccaaactgactgtccta

SEQ ID NO: 1186 - protein, 117 aa, synthetic construct
  REGION 1..117: note = PC32D5-H
EVQLVQSGAEVVKPGATVKISCKVSGYTFTNYWLNWVKQAPGRGLEWIGRIDPSDSEIHYDQKFKDRVTITADKSTSTAYMELSSLRSEDTAVYYCALTGIYAMAYWGQGTTVTVSS

SEQ ID NO: 1187 - protein, 5 aa, synthetic construct
  REGION 1..5: note = PC32D5-HCDR1
NYWLN

SEQ ID NO: 1188 - protein, 17 aa, synthetic construct
  REGION 1..17: note = PC32D5-HCDR2
RIDPSDSEIHYDQKFKD

SEQ ID NO: 1189 - protein, 8 aa, synthetic construct
  REGION 1..8: note = PC32D5-HCDR3
TGIYAMAY

SEQ ID NO: 1190 - DNA, 351 bp, synthetic construct
  misc_feature 1..351: note = PC32D5-H
  source 1..351: mol_type = other DNA
gaggtgcagctggtccagtcaggcgccgaagtggtgaagcctggcgccacagtgaagatatcctgcaaggtcagcggctacaccttcaccaactactggctgaactgggtgaaacaggcgcccggcaggggcctggaatggataggcaggatcgaccccagcgacagcgagatccactacgaccagaagttcaaggacagagtcaccataaccgcggacaagagcaccagcaccgcctacatggagctgtccagcctgagaagcgaggacaccgccgtgtactattgcgccctgaccggcatctacgccatggcctactggggccagggcaccacggtcaccgtctcctca

SEQ ID NO: 1191 - protein, 112 aa, synthetic construct
  REGION 1..112: note = PC32D5-L
DIVMTQSPLSLPVTPGESASISCRSSKSLLHSNGNTYLYWYLQKPGQSPQLLIYRMSNLASGVPDRFSGSGSGTDFTLRISRVEAEDVGVYYCLQHLEYPYTFGQGTKLEIK

SEQ ID NO: 1192 - protein, 16 aa, synthetic construct
  REGION 1..16: note = PC32D5-LCDR1
RSSKSLLHSNGNTYLY

SEQ ID NO: 1193 - protein, 7 aa, synthetic construct
  REGION 1..7: note = PC32D5-LCDR2
RMSNLAS

SEQ ID NO: 1194 - protein, 9 aa, synthetic construct
  REGION 1..9: note = PC32D5-LCDR3
LQHLEYPYT

SEQ ID NO: 1195 - DNA, 336 bp, synthetic construct
  misc_feature 1..336: note = PC32D5-L
  source 1..336: mol_type = other DNA
gacatcgtgatgacccagtcacctctaagcctgccagtgaccccaggcgagtcagcgtccatcagctgcaggtccagcaagagcctgctgcacagcaacggcaacacctacctgtactggtatctgcagaagccaggccagagcccccagctgctgatctacaggatgagcaacctggctagcggcgtgccagacagattcagcggcagcggctctggaaccgacttcaccctgaggatcagcagggtggaggccgaggacgtgggcgtgtactactgcctgcagcacctggaatacccctacaccttcggccaagggaccaagctggaaatcaag

SEQ ID NO: 1196 - protein, 244 aa, synthetic construct
  REGION 1..244: note = PC32D5-HL
EVQLVQSGAEVVKPGATVKISCKVSGYTFTNYWLNWVKQAPGRGLEWIGRIDPSDSEIHYDQKFKDRVTITADKSTSTAYMELSSLRSEDTAVYYCALTGIYAMAYWGQGTTVTVSSGGGGSGGGGSGGGGSDIVMTQSPLSLPVTPGESASISCRSSKSLLHSNGNTYLYWYLQKPGQSPQLLIYRMSNLASGVPDRFSGSGSGTDFTLRISRVEAEDVGVYYCLQHLEYPYTFGQGTKLEIK

SEQ ID NO: 1197 - DNA, 732 bp, synthetic construct
  misc_feature 1..732: note = PC32D5-HL
  source 1..732: mol_type = other DNA
gaggtgcagctggtccagtcaggcgccgaagtggtgaagcctggcgccacagtgaagatatcctgcaaggtcagcggctacaccttcaccaactactggctgaactgggtgaaacaggcgcccggcaggggcctggaatggataggcaggatcgaccccagcgacagcgagatccactacgaccagaagttcaaggacagagtcaccataaccgcggacaagagcaccagcaccgcctacatggagctgtccagcctgagaagcgaggacaccgccgtgtactattgcgccctgaccggcatctacgccatggcctactggggccagggcaccacggtcaccgtctcctcaggtggtggtggttctggcggcggcggctccggtggtggtggttctgacatcgtgatgacccagtcacctctaagcctgccagtgaccccaggcgagtcagcgtccatcagctgcaggtccagcaagagcctgctgcacagcaacggcaacacctacctgtactggtatctgcagaagccaggccagagcccccagctgctgatctacaggatgagcaacctggctagcggcgtgccagacagattcagcggcagcggctctggaaccgacttcaccctgaggatcagcagggtggaggccgaggacgtgggcgtgtactactgcctgcagcacctggaatacccctacaccttcggccaagggaccaagctggaaatcaag

SEQ ID NO: 1198 - protein, 499 aa, synthetic construct
  REGION 1..499: note = PC32D5 HL x I2C HL
EVQLVQSGAEVVKPGATVKISCKVSGYTFTNYWLNWVKQAPGRGLEWIGRIDPSDSEIHYDQKFKDRVTITADKSTSTAYMELSSLRSEDTAVYYCALTGIYAMAYWGQGTTVTVSSGGGGSGGGGSGGGGSDIVMTQSPLSLPVTPGESASISCRSSKSLLHSNGNTYLYWYLQKPGQSPQLLIYRMSNLASGVPDRFSGSGSGTDFTLRISRVEAEDVGVYYCLQHLEYPYTFGQGTKLEIKSGGGGSEVQLVESGGGLVQPGGSLKLSCAASGFTFNKYAMNWVRQAPGKGLEWVARIRSKYNNYATYYADSVKDRFTISRDDSKNTAYLQMNNLKTEDTAVYYCVRHGNFGNSYISYWAYWGQGTLVTVSSGGGGSGGGGSGGGGSQTVVTQEPSLTVSPGGTVTLTCGSSTGAVTSGNYPNWVQQKPGQAPRGLIGGTKFLAPGTPARFSGSLLGGKAALTLSGVQPEDEAEYYCVLWYSNRWVFGGGTKLTVL

SEQ ID NO: 1199 - DNA, 1497 bp, synthetic construct
  misc_feature 1..1497: note = PC32D5 HL x I2C HL
  source 1..1497: mol_type = other DNA
gaggtgcagctggtccagtcaggcgccgaagtggtgaagcctggcgccacagtgaagatatcctgcaaggtcagcggctacaccttcaccaactactggctgaactgggtgaaacaggcgcccggcaggggcctggaatggataggcaggatcgaccccagcgacagcgagatccactacgaccagaagttcaaggacagagtcaccataaccgcggacaagagcaccagcaccgcctacatggagctgtccagcctgagaagcgaggacaccgccgtgtactattgcgccctgaccggcatctacgccatggcctactggggccagggcaccacggtcaccgtctcctcaggtggtggtggttctggcggcggcggctccggtggtggtggttctgacatcgtgatgacccagtcacctctaagcctgccagtgaccccaggcgagtcagcgtccatcagctgcaggtccagcaagagcctgctgcacagcaacggcaacacctacctgtactggtatctgcagaagccaggccagagcccccagctgctgatctacaggatgagcaacctggctagcggcgtgccagacagattcagcggcagcggctctggaaccgacttcaccctgaggatcagcagggtggaggccgaggacgtgggcgtgtactactgcctgcagcacctggaatacccctacaccttcggccaagggaccaagctggaaatcaagtccggaggtggtggatccgaggtgcagctggtcgagtctggaggaggattggtgcagcctggagggtcattgaaactctcatgtgcagcctctggattcaccttcaataagtacgccatgaactgggtccgccaggctccaggaaagggtttggaatgggttgctcgcataagaagtaaatataataattatgcaacatattatgccgattcagtgaaagacaggttcaccatctccagagatgattcaaaaaacactgcctatctacaaatgaacaacttgaaaactgaggacactgccgtgtactactgtgtgagacatgggaacttcggtaatagctacatatcctactgggcttactggggccaagggactctggtcaccgtctcctcaggtggtggtggttctggcggcggcggctccggtggtggtggttctcagactgttgtgactcaggaaccttcactcaccgtatcacctggtggaacagtcacactcacttgtggctcctcgactggggctgttacatctggcaactacccaaactgggtccaacaaaaaccaggtcaggcaccccgtggtctaataggtgggactaagttcctcgcccccggtactcctgccagattctcaggctccctgcttggaggcaaggctgccctcaccctctcaggggtacagccagaggatgaggcagaatattactgtgttctatggtacagcaaccgctgggtgttcggtggaggaaccaaactgactgtccta

SEQ ID NO: 1200 - protein, 117 aa, synthetic construct
  REGION 1..117: note = PC17D10-H
EVQLVQSGAEVKKPGATVKISCKVSGYTFTNYWLNWVKQTPGKGLEWIGRIDPSDSEIHYDQKFKDKVTITADKSTSTAYMELSSLRSEDTAVYYCALTGIYAMAYWGQGTTVTVSS

SEQ ID NO: 1201 - protein, 5 aa, synthetic construct
  REGION 1..5: note = PC17D10-HCDR1
NYWLN

SEQ ID NO: 1202 - protein, 17 aa, synthetic construct
  REGION 1..17: note = PC17D10-HCDR2
RIDPSDSEIHYDQKFKD

SEQ ID NO: 1203 - protein, 8 aa, synthetic construct
  REGION 1..8: note = PC17D10-HCDR3
TGIYAMAY

SEQ ID NO: 1204 - DNA, 351 bp, synthetic construct
  misc_feature 1..351: note = PC17D10-H
  source 1..351: mol_type = other DNA
gaggtgcagctggtccagtcaggcgccgaagtgaagaagcctggcgccacagtgaagatatcctgcaaggtcagcggctacaccttcaccaactactggctgaactgggtgaaacagacgcccggcaagggcctggaatggataggcaggatcgaccccagcgacagcgagatccactacgaccagaagttcaaggacaaagtcaccataaccgcggacaagagcaccagcaccgcctacatggagctgtccagcctgagaagcgaggacaccgccgtgtactattgcgccctgaccggcatctacgccatggcctactggggccagggcaccacggtcaccgtctcctca

SEQ ID NO: 1205 - protein, 112 aa, synthetic construct
  REGION 1..112: note = PC17D10-L
DIVMTQAPLSLPVTPGEPVSISCRSSKSLLHSNGNTYLYWYLQKPGQSPQLLIYRMSNLASGVPDRFSGSGSGTDFTLRISRVEAEDVGVYYCLQHLEYPYTFGQGTKLEIK

SEQ ID NO: 1206 - protein, 16 aa, synthetic construct
  REGION 1..16: note = PC17D10-LCDR1
RSSKSLLHSNGNTYLY

SEQ ID NO: 1207 - protein, 7 aa, synthetic construct
  REGION 1..7: note = PC17D10-LCDR2
RMSNLAS

SEQ ID NO: 1208 - protein, 9 aa, synthetic construct
  REGION 1..9: note = PC17D10-LCDR3
LQHLEYPYT

SEQ ID NO: 1209 - DNA, 336 bp, synthetic construct
  misc_feature 1..336: note = PC17D10-L
  source 1..336: mol_type = other DNA
gacatcgtgatgacccaggcacctctaagcctgccagtgaccccaggcgagccagtgtccatcagctgcaggtccagcaagagcctgctgcacagcaacggcaacacctacctgtactggtatctgcagaagccaggccagagcccccagctgctgatctacaggatgagcaacctggctagcggcgtgccagacagattcagcggcagcggctctggaaccgacttcaccctgaggatcagcagggtggaggccgaggacgtgggcgtgtactactgcctgcagcacctggaatacccctacaccttcggccaagggaccaagctggaaatcaag

SEQ ID NO: 1210 - protein, 244 aa, synthetic construct
  REGION 1..244: note = PC17D10-HL
EVQLVQSGAEVKKPGATVKISCKVSGYTFTNYWLNWVKQTPGKGLEWIGRIDPSDSEIHYDQKFKDKVTITADKSTSTAYMELSSLRSEDTAVYYCALTGIYAMAYWGQGTTVTVSSGGGGSGGGGSGGGGSDIVMTQAPLSLPVTPGEPVSISCRSSKSLLHSNGNTYLYWYLQKPGQSPQLLIYRMSNLASGVPDRFSGSGSGTDFTLRISRVEAEDVGVYYCLQHLEYPYTFGQGTKLEIK

SEQ ID NO: 1211 - DNA, 732 bp, synthetic construct
  misc_feature 1..732: note = PC17D10-HL
  source 1..732: mol_type = other DNA
gaggtgcagctggtccagtcaggcgccgaagtgaagaagcctggcgccacagtgaagatatcctgcaaggtcagcggctacaccttcaccaactactggctgaactgggtgaaacagacgcccggcaagggcctggaatggataggcaggatcgaccccagcgacagcgagatccactacgaccagaagttcaaggacaaagtcaccataaccgcggacaagagcaccagcaccgcctacatggagctgtccagcctgagaagcgaggacaccgccgtgtactattgcgccctgaccggcatctacgccatggcctactggggccagggcaccacggtcaccgtctcctcaggtggtggtggttctggcggcggcggctccggtggtggtggttctgacatcgtgatgacccaggcacctctaagcctgccagtgaccccaggcgagccagtgtccatcagctgcaggtccagcaagagcctgctgcacagcaacggcaacacctacctgtactggtatctgcagaagccaggccagagcccccagctgctgatctacaggatgagcaacctggctagcggcgtgccagacagattcagcggcagcggctctggaaccgacttcaccctgaggatcagcagggtggaggccgaggacgtgggcgtgtactactgcctgcagcacctggaatacccctacaccttcggccaagggaccaagctggaaatcaag

SEQ ID NO: 1212 - protein, 499 aa, synthetic construct
  REGION 1..499: note = PC17D10 HL x I2C HL
EVQLVQSGAEVKKPGATVKISCKVSGYTFTNYWLNWVKQTPGKGLEWIGRIDPSDSEIHYDQKFKDKVTITADKSTSTAYMELSSLRSEDTAVYYCALTGIYAMAYWGQGTTVTVSSGGGGSGGGGSGGGGSDIVMTQAPLSLPVTPGEPVSISCRSSKSLLHSNGNTYLYWYLQKPGQSPQLLIYRMSNLASGVPDRFSGSGSGTDFTLRISRVEAEDVGVYYCLQHLEYPYTFGQGTKLEIKSGGGGSEVQLVESGGGLVQPGGSLKLSCAASGFTFNKYAMNWVRQAPGKGLEWVARIRSKYNNYATYYADSVKDRFTISRDDSKNTAYLQMNNLKTEDTAVYYCVRHGNFGNSYISYWAYWGQGTLVTVSSGGGGSGGGGSGGGGSQTVVTQEPSLTVSPGGTVTLTCGSSTGAVTSGNYPNWVQQKPGQAPRGLIGGTKFLAPGTPARFSGSLLGGKAALTLSGVQPEDEAEYYCVLWYSNRWVFGGGTKLTVL

SEQ ID NO: 1213 - DNA, 1497 bp, synthetic construct
  misc_feature 1..1497: note = PC17D10 HL x I2C HL
  source 1..1497: mol_type = other DNA
gaggtgcagctggtccagtcaggcgccgaagtgaagaagcctggcgccacagtgaagatatcctgcaaggtcagcggctacaccttcaccaactactggctgaactgggtgaaacagacgcccggcaagggcctggaatggataggcaggatcgaccccagcgacagcgagatccactacgaccagaagttcaaggacaaagtcaccataaccgcggacaagagcaccagcaccgcctacatggagctgtccagcctgagaagcgaggacaccgccgtgtactattgcgccctgaccggcatctacgccatggcctactggggccagggcaccacggtcaccgtctcctcaggtggtggtggttctggcggcggcggctccggtggtggtggttctgacatcgtgatgacccaggcacctctaagcctgccagtgaccccaggcgagccagtgtccatcagctgcaggtccagcaagagcctgctgcacagcaacggcaacacctacctgtactggtatctgcagaagccaggccagagcccccagctgctgatctacaggatgagcaacctggctagcggcgtgccagacagattcagcggcagcggctctggaaccgacttcaccctgaggatcagcagggtggaggccgaggacgtgggcgtgtactactgcctgcagcacctggaatacccctacaccttcggccaagggaccaagctggaaatcaagtccggaggtggtggatccgaggtgcagctggtcgagtctggaggaggattggtgcagcctggagggtcattgaaactctcatgtgcagcctctggattcaccttcaataagtacgccatgaactgggtccgccaggctccaggaaagggtttggaatgggttgctcgcataagaagtaaatataataattatgcaacatattatgccgattcagtgaaagacaggttcaccatctccagagatgattcaaaaaacactgcctatctacaaatgaacaacttgaaaactgaggacactgccgtgtactactgtgtgagacatgggaacttcggtaatagctacatatcctactgggcttactggggccaagggactctggtcaccgtctcctcaggtggtggtggttctggcggcggcggctccggtggtggtggttctcagactgttgtgactcaggaaccttcactcaccgtatcacctggtggaacagtcacactcacttgtggctcctcgactggggctgttacatctggcaactacccaaactgggtccaacaaaaaccaggtcaggcaccccgtggtctaataggtgggactaagttcctcgcccccggtactcctgccagattctcaggctccctgcttggaggcaaggctgccctcaccctctcaggggtacagccagaggatgaggcagaatattactgtgttctatggtacagcaaccgctgggtgttcggtggaggaaccaaactgactgtccta

SEQ ID NO: 1214 - protein, 117 aa, synthetic construct
  REGION 1..117: note = PC16E12-H
EVQLVQSGAEVKKPGAPVKISCKVSGYTFTNYWLNWVKQRPGKGLEWIGRIDPSDSEIHYDQKFKDRVTITVDKSTSTAYIELSSLRSEDTAVYYCALTGIYAMAYWGQGTTVTVSS

SEQ ID NO: 1215 - protein, 5 aa, synthetic construct
  REGION 1..5: note = PC16E12-HCDR1
NYWLN

SEQ ID NO: 1216 - protein, 17 aa, synthetic construct
  REGION 1..17: note = PC16E12-HCDR2
RIDPSDSEIHYDQKFKD

SEQ ID NO: 1217 - protein, 8 aa, synthetic construct
  REGION 1..8: note = PC16E12-HCDR3
TGIYAMAY

SEQ ID NO: 1218 - DNA, 351 bp, synthetic construct
  misc_feature 1..351: note = PC16E12-H
  source 1..351: mol_type = other DNA
gaggtgcagctggtccagtcaggcgccgaagtgaagaagcctggcgccccagtgaagatatcctgcaaggtcagcggctacaccttcaccaactactggctgaactgggtgaaacagaggcccggcaagggcctggaatggataggtaggatcgaccccagcgacagcgagatccactacgaccagaagttcaaggacagagtcaccataaccgtggacaagagcaccagcaccgcctacatcgagctgtccagcctgagaagcgaggacaccgccgtgtactattgcgccctgaccggcatctacgccatggcctactggggccagggcaccacggtcaccgtctcctca

SEQ ID NO: 1219 - protein, 112 aa, synthetic construct
  REGION 1..112: note = PC16E12-L
DIVMTQSPLSLPVTPGEPVSISCRSSKSLLHSNGNTYLYWYLQKPGQSPQLLIYRMSNLASGVPDRFSGSGSGTDFTLKISRVEAEDVGVYYCLQHLEYPYTFGQGTKLEIK

SEQ ID NO: 1220 - protein, 16 aa, synthetic construct
  REGION 1..16: note = PC16E12-LCDR1
RSSKSLLHSNGNTYLY

SEQ ID NO: 1221 - protein, 7 aa, synthetic construct
  REGION 1..7: note = PC16E12-LCDR2
RMSNLAS

SEQ ID NO: 1222 - protein, 9 aa, synthetic construct
  REGION 1..9: note = PC16E12-LCDR3
LQHLEYPYT

SEQ ID NO: 1223 - DNA, 336 bp, synthetic construct
  misc_feature 1..336: note = PC16E12-L
  source 1..336: mol_type = other DNA
gacatcgtgatgacccagtcacctctaagcctgccagtgaccccaggcgagccagtgtccatcagctgcaggtccagcaagagcctgctgcacagcaacggcaacacctacctgtactggtatctgcagaagccaggccagagcccccagctgctgatctacaggatgagcaacctggctagcggcgtgccagacagattcagcggcagcggctctggaaccgacttcaccctgaagatcagcagggtggaggccgaggacgtgggcgtgtactactgcctgcagcacctggaatacccctacaccttcggccaagggaccaagctggaaatcaag

SEQ ID NO: 1224 - protein, 244 aa, synthetic construct
  REGION 1..244: note = PC16E12-HL
EVQLVQSGAEVKKPGAPVKISCKVSGYTFTNYWLNWVKQRPGKGLEWIGRIDPSDSEIHYDQKFKDRVTITVDKSTSTAYIELSSLRSEDTAVYYCALTGIYAMAYWGQGTTVTVSSGGGGSGGGGSGGGGSDIVMTQSPLSLPVTPGEPVSISCRSSKSLLHSNGNTYLYWYLQKPGQSPQLLIYRMSNLASGVPDRFSGSGSGTDFTLKISRVEAEDVGVYYCLQHLEYPYTFGQGTKLEIK

SEQ ID NO: 1225 - DNA, 732 bp, synthetic construct
  misc_feature 1..732: note = PC16E12-HL
  source 1..732: mol_type = other DNA
gaggtgcagctggtccagtcaggcgccgaagtgaagaagcctggcgccccagtgaagatatcctgcaaggtcagcggctacaccttcaccaactactggctgaactgggtgaaacagaggcccggcaagggcctggaatggataggtaggatcgaccccagcgacagcgagatccactacgaccagaagttcaaggacagagtcaccataaccgtggacaagagcaccagcaccgcctacatcgagctgtccagcctgagaagcgaggacaccgccgtgtactattgcgccctgaccggcatctacgccatggcctactggggccagggcaccacggtcaccgtctcctcaggtggtggtggttctggcggcggcggctccggtggtggtggttctgacatcgtgatgacccagtcacctctaagcctgccagtgaccccaggcgagccagtgtccatcagctgcaggtccagcaagagcctgctgcacagcaacggcaacacctacctgtactggtatctgcagaagccaggccagagcccccagctgctgatctacaggatgagcaacctggctagcggcgtgccagacagattcagcggcagcggctctggaaccgacttcaccctgaagatcagcagggtggaggccgaggacgtgggcgtgtactactgcctgcagcacctggaatacccctacaccttcggccaagggaccaagctggaaatcaag

SEQ ID NO: 1226 - protein, 499 aa, synthetic construct
  REGION 1..499: note = PC16E12 HL x I2C HL
EVQLVQSGAEVKKPGAPVKISCKVSGYTFTNYWLNWVKQRPGKGLEWIGRIDPSDSEIHYDQKFKDRVTITVDKSTSTAYIELSSLRSEDTAVYYCALTGIYAMAYWGQGTTVTVSSGGGGSGGGGSGGGGSDIVMTQSPLSLPVTPGEPVSISCRSSKSLLHSNGNTYLYWYLQKPGQSPQLLIYRMSNLASGVPDRFSGSGSGTDFTLKISRVEAEDVGVYYCLQHLEYPYTFGQGTKLEIKSGGGGSEVQLVESGGGLVQPGGSLKLSCAASGFTFNKYAMNWVRQAPGKGLEWVARIRSKYNNYATYYADSVKDRFTISRDDSKNTAYLQMNNLKTEDTAVYYCVRHGNFGNSYISYWAYWGQGTLVTVSSGGGGSGGGGSGGGGSQTVVTQEPSLTVSPGGTVTLTCGSSTGAVTSGNYPNWVQQKPGQAPRGLIGGTKFLAPGTPARFSGSLLGGKAALTLSGVQPEDEAEYYCVLWYSNRWVFGGGTKLTVL

SEQ ID NO: 1227 - DNA, 1497 bp, synthetic construct
  misc_feature 1..1497: note = PC16E12 HL x I2C HL
  source 1..1497: mol_type = other DNA
gaggtgcagctggtccagtcaggcgccgaagtgaagaagcctggcgccccagtgaagatatcctgcaaggtcagcggctacaccttcaccaactactggctgaactgggtgaaacagaggcccggcaagggcctggaatggataggtaggatcgaccccagcgacagcgagatccactacgaccagaagttcaaggacagagtcaccataaccgtggacaagagcaccagcaccgcctacatcgagctgtccagcctgagaagcgaggacaccgccgtgtactattgcgccctgaccggcatctacgccatggcctactggggccagggcaccacggtcaccgtctcctcaggtggtggtggttctggcggcggcggctccggtggtggtggttctgacatcgtgatgacccagtcacctctaagcctgccagtgaccccaggcgagccagtgtccatcagctgcaggtccagcaagagcctgctgcacagcaacggcaacacctacctgtactggtatctgcagaagccaggccagagcccccagctgctgatctacaggatgagcaacctggctagcggcgtgccagacagattcagcggcagcggctctggaaccgacttcaccctgaagatcagcagggtggaggccgaggacgtgggcgtgtactactgcctgcagcacctggaatacccctacaccttcggccaagggaccaagctggaaatcaagtccggaggtggtggatccgaggtgcagctggtcgagtctggaggaggattggtgcagcctggagggtcattgaaactctcatgtgcagcctctggattcaccttcaataagtacgccatgaactgggtccgccaggctccaggaaagggtttggaatgggttgctcgcataagaagtaaatataataattatgcaacatattatgccgattcagtgaaagacaggttcaccatctccagagatgattcaaaaaacactgcctatctacaaatgaacaacttgaaaactgaggacactgccgtgtactactgtgtgagacatgggaacttcggtaatagctacatatcctactgggcttactggggccaagggactctggtcaccgtctcctcaggtggtggtggttctggcggcggcggctccggtggtggtggttctcagactgttgtgactcaggaaccttcactcaccgtatcacctggtggaacagtcacactcacttgtggctcctcgactggggctgttacatctggcaactacccaaactgggtccaacaaaaaccaggtcaggcaccccgtggtctaataggtgggactaagttcctcgcccccggtactcctgccagattctcaggctccctgcttggaggcaaggctgccctcaccctctcaggggtacagccagaggatgaggcagaatattactgtgttctatggtacagcaaccgctgggtgttcggtggaggaaccaaactgactgtccta

SEQ ID NO: 1228 - protein, 117 aa, synthetic construct
  REGION 1..117: note = PC08F4-H
EVQLVQSGAEVKKPGATVKISCKVSGYTFTNYWLNWVQQRPGKGLEWIGRIDPSDSEIHYDQKFKDRVTLTADKSTSTAYMELSSLRSEDTAVYYCALTGIYAMAYWGQGTTVTVSS

SEQ ID NO: 1229 - protein, 5 aa, synthetic construct
  REGION 1..5: note = PC08F4-HCDR1
NYWLN

SEQ ID NO: 1230 - protein, 17 aa, synthetic construct
  REGION 1..17: note = PC08F4-HCDR2
RIDPSDSEIHYDQKFKD

SEQ ID NO: 1231 - protein, 8 aa, synthetic construct
  REGION 1..8: note = PC08F4-HCDR3
TGIYAMAY

SEQ ID NO: 1232 - DNA, 351 bp, synthetic construct
  misc_feature 1..351: note = PC08F4-H
  source 1..351: mol_type = other DNA
gaggtgcagctggtccagtcaggcgccgaagtgaagaagcctggcgccacagtgaagatatcctgcaaggtcagcggctacaccttcaccaactactggctgaactgggtgcaacagaggcccggcaagggcctggaatggataggcaggatcgaccccagcgacagcgagatccactacgaccagaagttcaaggacagagtcaccctaaccgcggacaagagcaccagcaccgcctacatggagctgtccagcctgagaagcgaggacaccgccgtgtactattgcgccctgaccggcatctacgccatggcctactggggccagggcaccacggtcaccgtctcctca

SEQ ID NO: 1233 - protein, 112 aa, synthetic construct
  REGION 1..112: note = PC08F4-L
DIVMTQSPLSLPVTPGESASISCRSSKSLLHSNGNTYLYWYLQKPGQSPQLLIYRMSNLASGVPDRFSGSGSGTDFTLKISRVEAEDVGVYYCLQHLEYPYTFGQGTKLEIK

SEQ ID NO: 1234 - protein, 16 aa, synthetic construct
  REGION 1..16: note = PC08F4-LCDR1
RSSKSLLHSNGNTYLY

SEQ ID NO: 1235 - protein, 7 aa, synthetic construct
  REGION 1..7: note = PC08F4-LCDR2
RMSNLAS

SEQ ID NO: 1236 - protein, 9 aa, synthetic construct
  REGION 1..9: note = PC08F4-LCDR3
LQHLEYPYT

SEQ ID NO: 1237 - DNA, 336 bp, synthetic construct
  misc_feature 1..336: note = PC08F4-L
  source 1..336: mol_type = other DNA
gacatcgtgatgacccagtcacctctaagcctgccagtgaccccaggcgagtcagcgtccatcagctgcaggtccagcaagagcctgctgcacagcaacggcaacacctacctgtactggtatctgcagaagccaggccagagcccccagctgctgatctacaggatgagcaacctggctagcggcgtgccagacagattcagcggcagcggctctggaaccgacttcaccctgaagatcagcagggtggaggccgaggacgtgggcgtgtactactgcctgcagcacctggaatacccctacaccttcggccaagggaccaagctggaaatcaag

SEQ ID NO: 1238 - protein, 244 aa, synthetic construct
  REGION 1..244: note = PC08F4-HL
EVQLVQSGAEVKKPGATVKISCKVSGYTFTNYWLNWVQQRPGKGLEWIGRIDPSDSEIHYDQKFKDRVTLTADKSTSTAYMELSSLRSEDTAVYYCALTGIYAMAYWGQGTTVTVSSGGGGSGGGGSGGGGSDIVMTQSPLSLPVTPGESASISCRSSKSLLHSNGNTYLYWYLQKPGQSPQLLIYRMSNLASGVPDRFSGSGSGTDFTLKISRVEAEDVGVYYCLQHLEYPYTFGQGTKLEIK

SEQ ID NO: 1239 - DNA, 732 bp, synthetic construct
  misc_feature 1..732: note = PC08F4-HL
  source 1..732: mol_type = other DNA
gaggtgcagctggtccagtcaggcgccgaagtgaagaagcctggcgccacagtgaagatatcctgcaaggtcagcggctacaccttcaccaactactggctgaactgggtgcaacagaggcccggcaagggcctggaatggataggcaggatcgaccccagcgacagcgagatccactacgaccagaagttcaaggacagagtcaccctaaccgcggacaagagcaccagcaccgcctacatggagctgtccagcctgagaagcgaggacaccgccgtgtactattgcgccctgaccggcatctacgccatggcctactggggccagggcaccacggtcaccgtctcctcaggtggtggtggttctggcggcggcggctccggtggtggtggttctgacatcgtgatgacccagtcacctctaagcctgccagtgaccccaggcgagtcagcgtccatcagctgcaggtccagcaagagcctgctgcacagcaacggcaacacctacctgtactggtatctgcagaagccaggccagagcccccagctgctgatctacaggatgagcaacctggctagcggcgtgccagacagattcagcggcagcggctctggaaccgacttcaccctgaagatcagcagggtggaggccgaggacgtgggcgtgtactactgcctgcagcacctggaatacccctacaccttcggccaagggaccaagctggaaatcaag

SEQ ID NO: 1240 - protein, 499 aa, synthetic construct
  REGION 1..499: note = PC08F4 HL x I2C HL
EVQLVQSGAEVKKPGATVKISCKVSGYTFTNYWLNWVQQRPGKGLEWIGRIDPSDSEIHYDQKFKDRVTLTADKSTSTAYMELSSLRSEDTAVYYCALTGIYAMAYWGQGTTVTVSSGGGGSGGGGSGGGGSDIVMTQSPLSLPVTPGESASISCRSSKSLLHSNGNTYLYWYLQKPGQSPQLLIYRMSNLASGVPDRFSGSGSGTDFTLKISRVEAEDVGVYYCLQHLEYPYTFGQGTKLEIKSGGGGSEVQLVESGGGLVQPGGSLKLSCAASGFTFNKYAMNWVRQAPGKGLEWVARIRSKYNNYATYYADSVKDRFTISRDDSKNTAYLQMNNLKTEDTAVYYCVRHGNFGNSYISYWAYWGQGTLVTVSSGGGGSGGGGSGGGGSQTVVTQEPSLTVSPGGTVTLTCGSSTGAVTSGNYPNWVQQKPGQAPRGLIGGTKFLAPGTPARFSGSLLGGKAALTLSGVQPEDEAEYYCVLWYSNRWVFGGGTKLTVL

SEQ ID NO: 1241 - DNA, 1497 bp, synthetic construct
  misc_feature 1..1497: note = PC08F4 HL x I2C HL
  source 1..1497: mol_type = other DNA
gaggtgcagctggtccagtcaggcgccgaagtgaagaagcctggcgccacagtgaagatatcctgcaaggtcagcggctacaccttcaccaactactggctgaactgggtgcaacagaggcccggcaagggcctggaatggataggcaggatcgaccccagcgacagcgagatccactacgaccagaagttcaaggacagagtcaccctaaccgcggacaagagcaccagcaccgcctacatggagctgtccagcctgagaagcgaggacaccgccgtgtactattgcgccctgaccggcatctacgccatggcctactggggccagggcaccacggtcaccgtctcctcaggtggtggtggttctggcggcggcggctccggtggtggtggttctgacatcgtgatgacccagtcacctctaagcctgccagtgaccccaggcgagtcagcgtccatcagctgcaggtccagcaagagcctgctgcacagcaacggcaacacctacctgtactggtatctgcagaagccaggccagagcccccagctgctgatctacaggatgagcaacctggctagcggcgtgccagacagattcagcggcagcggctctggaaccgacttcaccctgaagatcagcagggtggaggccgaggacgtgggcgtgtactactgcctgcagcacctggaatacccctacaccttcggccaagggaccaagctggaaatcaagtccggaggtggtggatccgaggtgcagctggtcgagtctggaggaggattggtgcagcctggagggtcattgaaactctcatgtgcagcctctggattcaccttcaataagtacgccatgaactgggtccgccaggctccaggaaagggtttggaatgggttgctcgcataagaagtaaatataataattatgcaacatattatgccgattcagtgaaagacaggttcaccatctccagagatgattcaaaaaacactgcctatctacaaatgaacaacttgaaaactgaggacactgccgtgtactactgtgtgagacatgggaacttcggtaatagctacatatcctactgggcttactggggccaagggactctggtcaccgtctcctcaggtggtggtggttctggcggcggcggctccggtggtggtggttctcagactgttgtgactcaggaaccttcactcaccgtatcacctggtggaacagtcacactcacttgtggctcctcgactggggctgttacatctggcaactacccaaactgggtccaacaaaaaccaggtcaggcaccccgtggtctaataggtgggactaagttcctcgcccccggtactcctgccagattctcaggctccctgcttggaggcaaggctgccctcaccctctcaggggtacagccagaggatgaggcagaatattactgtgttctatggtacagcaaccgctgggtgttcggtggaggaaccaaactgactgtccta

SEQ ID NO: 1242 - protein, 117 aa, synthetic construct
  REGION 1..117: note = PC17F5-H
EVQLVQSGAEVMKPGATVKISCKVSGYTFTNYWLNWVKQAPGKGLEWIGRIDPSDSEIHYDQKFKDRVTITANKSTSTAYMELSSLTSEDTAVYYCALTGIYAMAYWGQGTTVTVSS

SEQ ID NO: 1243 - protein, 5 aa, synthetic construct
  REGION 1..5: note = PC17F5-HCDR1
NYWLN

SEQ ID NO: 1244 - protein, 17 aa, synthetic construct
  REGION 1..17: note = PC17F5-HCDR2
RIDPSDSEIHYDQKFKD

SEQ ID NO: 1245 - protein, 8 aa, synthetic construct
  REGION 1..8: note = PC17F5-HCDR3
TGIYAMAY

SEQ ID NO: 1246 - DNA, 372 bp, synthetic construct
  misc_feature 1..372: note = PC17F5-H
  source 1..372: mol_type = other DNA
caggtgcagctggtccagtcaggacctgaggtgatgaagcctggggcttcagtgaagatgtcctgcaaggcttctggatacacattcactgactatgttatacactgggtgaggcaggcacctggaaagcgccttgagtggatgggatatattaatccttatgatgatgatactacctacaaccagaagttcaagggccgggtcacaattactgtagacaaatccgccagcacagcctacatggaactcaacagcctgacatctgaggacactgcagtctattactgtgcaagaagggggaactcctatgatggttacttcgactattctatggactactggggtcaaggaaccttggtcaccgtctcctca

SEQ ID NO: 1247 - protein, 112 aa, synthetic construct; identical to SEQ ID NO: 1219
  REGION 1..112: note = PC17F5-L

SEQ ID NO: 1248 - protein, 16 aa, synthetic construct
  REGION 1..16: note = PC17F5-LCDR1
RSSKSLLHSNGNTYLY

SEQ ID NO: 1249 - protein, 7 aa, synthetic construct
  REGION 1..7: note = PC17F5-LCDR2
RMSNLAS

SEQ ID NO: 1250 - protein, 9 aa, synthetic construct
  REGION 1..9: note = PC17F5-LCDR3
LQHLEYPYT

SEQ ID NO: 1251 - protein, 324 aa, synthetic construct
  REGION 1..324: note = PC17F5-L
GACATCCAGCTGACCCAGTCTCCAAGCTTCATGTCCGCATCAGTAGGAGACAGAGTCACCATCACCTGCAGGGCCAGTCAGAATGTGGGTACTGCTGTAGCCTGGTATCAACAGAAACCAGGACAAGCCCCTAAATTACTGATTTACTCGGCATCGAATCGGTACACTGGAGTCCCTAGTCGCTTCTCAGGCAGTGGATCTGGGACAGAGTTCACTCTCACCATCAGCAGTCTGCAGTCTGAAGACTTCGCAACTTATTACTGCCAGCAATATACCAACTATCCCATGTATACGTTTGGACAGGGGACCAAGCTGGAAATAAAA

SEQ ID NO: 1252 - protein, 244 aa, synthetic construct
  REGION 1..244: note = PC17F5-HL
EVQLVQSGAEVMKPGATVKISCKVSGYTFTNYWLNWVKQAPGKGLEWIGRIDPSDSEIHYDQKFKDRVTITANKSTSTAYMELSSLTSEDTAVYYCALTGIYAMAYWGQGTTVTVSSGGGGSGGGGSGGGGSDIVMTQSPLSLPVTPGEPVSISCRSSKSLLHSNGNTYLYWYLQKPGQSPQLLIYRMSNLASGVPDRFSGSGSGTDFTLKISRVEAEDVGVYYCLQHLEYPYTFGQGTKLEIK

SEQ ID NO: 1253 - DNA, 732 bp, synthetic construct
  misc_feature 1..732: note = PC17F5-HL
  source 1..732: mol_type = other DNA
gaggtgcagctggtccagtcaggcgccgaagtgatgaagcctggcgccacagtgaagatatcctgcaaggtcagcggctacaccttcaccaactactggctgaactgggtgaaacaggcgcccggcaagggcctggaatggataggcaggatcgaccccagcgacagcgagatccactacgaccagaagttcaaggacagagtcaccataaccgcgaacaagagcaccagcaccgcctacatggagctgtccagcctgacaagcgaggacaccgccgtgtactattgcgccctgaccggcatctacgccatggcctactggggccagggcaccacggtcaccgtctcctcaggtggtggtggttctggcggcggcggctccggtggtggtggttctgacatcgtgatgacccagtcacctctaagcctgccagtgaccccaggcgagccagtgtccatcagctgcaggtccagcaagagcctgctgcacagcaacggcaacacctacctgtactggtatctgcagaagccaggccagagcccccagctgctgatctacaggatgagcaacctggctagcggcgtgccagacagattcagcggcagcggctctggaaccgacttcaccctgaagatcagcagggtggaggccgaggacgtgggcgtgtactactgcctgcagcacctggaatacccctacaccttcggccaagggaccaagctggaaatcaag

SEQ ID NO: 1254 - protein, 499 aa, synthetic construct
  REGION 1..499: note = PC17F5 HL x I2C HL
EVQLVQSGAEVMKPGATVKISCKVSGYTFTNYWLNWVKQAPGKGLEWIGRIDPSDSEIHYDQKFKDRVTITANKSTSTAYMELSSLTSEDTAVYYCALTGIYAMAYWGQGTTVTVSSGGGGSGGGGSGGGGSDIVMTQSPLSLPVTPGEPVSISCRSSKSLLHSNGNTYLYWYLQKPGQSPQLLIYRMSNLASGVPDRFSGSGSGTDFTLKISRVEAEDVGVYYCLQHLEYPYTFGQGTKLEIKSGGGGSEVQLVESGGGLVQPGGSLKLSCAASGFTFNKYAMNWVRQAPGKGLEWVARIRSKYNNYATYYADSVKDRFTISRDDSKNTAYLQMNNLKTEDTAVYYCVRHGNFGNSYISYWAYWGQGTLVTVSSGGGGSGGGGSGGGGSQTVVTQEPSLTVSPGGTVTLTCGSSTGAVTSGNYPNWVQQKPGQAPRGLIGGTKFLAPGTPARFSGSLLGGKAALTLSGVQPEDEAEYYCVLWYSNRWVFGGGTKLTVL

SEQ ID NO: 1255 - DNA, 1497 bp, synthetic construct
  misc_feature 1..1497: note = PC17F5 HL x I2C HL
  source 1..1497: mol_type = other DNA
gaggtgcagctggtccagtcaggcgccgaagtgatgaagcctggcgccacagtgaagatatcctgcaaggtcagcggctacaccttcaccaactactggctgaactgggtgaaacaggcgcccggcaagggcctggaatggataggcaggatcgaccccagcgacagcgagatccactacgaccagaagttcaaggacagagtcaccataaccgcgaacaagagcaccagcaccgcctacatggagctgtccagcctgacaagcgaggacaccgccgtgtactattgcgccctgaccggcatctacgccatggcctactggggccagggcaccacggtcaccgtctcctcaggtggtggtggttctggcggcggcggctccggtggtggtggttctgacatcgtgatgacccagtcacctctaagcctgccagtgaccccaggcgagccagtgtccatcagctgcaggtccagcaagagcctgctgcacagcaacggcaacacctacctgtactggtatctgcagaagccaggccagagcccccagctgctgatctacaggatgagcaacctggctagcggcgtgccagacagattcagcggcagcggctctggaaccgacttcaccctgaagatcagcagggtggaggccgaggacgtgggcgtgtactactgcctgcagcacctggaatacccctacaccttcggccaagggaccaagctggaaatcaagtccggaggtggtggatccgaggtgcagctggtcgagtctggaggaggattggtgcagcctggagggtcattgaaactctcatgtgcagcctctggattcaccttcaataagtacgccatgaactgggtccgccaggctccaggaaagggtttggaatgggttgctcgcataagaagtaaatataataattatgcaacatattatgccgattcagtgaaagacaggttcaccatctccagagatgattcaaaaaacactgcctatctacaaatgaacaacttgaaaactgaggacactgccgtgtactactgtgtgagacatgggaacttcggtaatagctacatatcctactgggcttactggggccaagggactctggtcaccgtctcctcaggtggtggtggttctggcggcggcggctccggtggtggtggttctcagactgttgtgactcaggaaccttcactcaccgtatcacctggtggaacagtcacactcacttgtggctcctcgactggggctgttacatctggcaactacccaaactgggtccaacaaaaaccaggtcaggcaccccgtggtctaataggtgggactaagttcctcgcccccggtactcctgccagattctcaggctccctgcttggaggcaaggctgccctcaccctctcaggggtacagccagaggatgaggcagaatattactgtgttctatggtacagcaaccgctgggtgttcggtggaggaaccaaactgactgtccta

SEQ ID NO: 1256 - protein, 117 aa, synthetic construct
  REGION 1..117: note = PC17H10-H
EVQLVQSGAEVKKPGATVKISCKVSGYTFTNYWLNWVKQTPGKGLEWMGRIDPSDSEIHYDQKFKDRVTLTADTSTDTAYMELSSLTSEDTAVYYCALTGIYAMAYWGQGTTVTVSS

SEQ ID NO: 1257 - protein, 5 aa, synthetic construct
  REGION 1..5: note = PC17H10-HCDR1
NYWLN

SEQ ID NO: 1258 - protein, 17 aa, synthetic construct
  REGION 1..17: note = PC17H10-HCDR2
RIDPSDSEIHYDQKFKD

SEQ ID NO: 1259 - protein, 8 aa, synthetic construct
  REGION 1..8: note = PC17H10-HCDR3
TGIYAMAY

SEQ ID NO: 1260 - DNA, 351 bp, synthetic construct
  misc_feature 1..351: note = PC17H10-H
  source 1..351: mol_type = other DNA
gaggtgcagctggtccagtcaggcgccgaagtgaagaagcctggcgccacagtgaagatatcctgcaaggtcagcggctacaccttcaccaactactggctgaactgggtgaaacagacgcccggcaagggcctggaatggatgggcaggatcgaccccagcgacagcgagatccactacgaccagaagttcaaggacagagtcaccctaaccgcggacacgagcaccgacaccgcctacatggagctgtccagcctgacaagcgaggacaccgccgtgtactattgcgccctgaccggcatctacgccatggcctactggggccagggcaccacggtcaccgtctcctca

SEQ ID NO: 1261 - protein, 112 aa, synthetic construct
  REGION 1..112: note = PC17H10-L
DIVMTQAPLSLPVTPGEPASISCRSSKSLLHSNGNTYLYWYLQKPGQSPQLLIYRMSNLASGVPDRFSGSGSGTDFTLKISRVEAEDVGVYYCLQHLEYPYTFGQGTKLEIK

SEQ ID NO: 1262 - protein, 16 aa, synthetic construct
  REGION 1..16: note = PC17H10-LCDR1
RSSKSLLHSNGNTYLY

SEQ ID NO: 1263 - protein, 7 aa, synthetic construct
  REGION 1..7: note = PC17H10-LCDR2
RMSNLAS

SEQ ID NO: 1264 - protein, 9 aa, synthetic construct
  REGION 1..9: note = PC17H10-LCDR3
LQHLEYPYT

SEQ ID NO: 1265 - DNA, 336 bp, synthetic construct
  misc_feature 1..336: note = PC17H10-L
  source 1..336: mol_type = other DNA
gacatcgtgatgacccaggcacctctaagcctgccagtgaccccaggcgagccagcgtccatcagctgcaggtccagcaagagcctgctgcacagcaacggcaacacctacctgtactggtatctgcagaagccaggccagagcccccagctgctgatctacaggatgagcaacctggctagcggcgtgccagacagattcagcggcagcggctctggaaccgacttcaccctgaagatcagcagggtggaggccgaggacgtgggcgtgtactactgcctgcagcacctggaatacccctacaccttcggccaagggaccaagctggaaatcaag

SEQ ID NO: 1266 - protein, 244 aa, synthetic construct
  REGION 1..244: note = PC17H10-HL
EVQLVQSGAEVKKPGATVKISCKVSGYTFTNYWLNWVKQTPGKGLEWMGRIDPSDSEIHYDQKFKDRVTLTADTSTDTAYMELSSLTSEDTAVYYCALTGIYAMAYWGQGTTVTVSSGGGGSGGGGSGGGGSDIVMTQAPLSLPVTPGEPASISCRSSKSLLHSNGNTYLYWYLQKPGQSPQLLIYRMSNLASGVPDRFSGSGSGTDFTLKISRVEAEDVGVYYCLQHLEYPYTFGQGTKLEIK

SEQ ID NO: 1267 - DNA, 732 bp, synthetic construct
  misc_feature 1..732: note = PC17H10-HL
  source 1..732: mol_type = other DNA
gaggtgcagctggtccagtcaggcgccgaagtgaagaagcctggcgccacagtgaagatatcctgcaaggtcagcggctacaccttcaccaactactggctgaactgggtgaaacagacgcccggcaagggcctggaatggatgggcaggatcgaccccagcgacagcgagatccactacgaccagaagttcaaggacagagtcaccctaaccgcggacacgagcaccgacaccgcctacatggagctgtccagcctgacaagcgaggacaccgccgtgtactattgcgccctgaccggcatctacgccatggcctactggggccagggcaccacggtcaccgtctcctcaggtggtggtggttctggcggcggcggctccggtggtggtggttctgacatcgtgatgacccaggcacctctaagcctgccagtgaccccaggcgagccagcgtccatcagctgcaggtccagcaagagcctgctgcacagcaacggcaacacctacctgtactggtatctgcagaagccaggccagagcccccagctgctgatctacaggatgagcaacctggctagcggcgtgccagacagattcagcggcagcggctctggaaccgacttcaccctgaagatcagcagggtggaggccgaggacgtgggcgtgtactactgcctgcagcacctggaatacccctacaccttcggccaagggaccaagctggaaatcaag

SEQ ID NO: 1268 - protein, 499 aa, synthetic construct
  REGION 1..499: note = PC17H10 HL X I2C HL
EVQLVQSGAEVKKPGATVKISCKVSGYTFTNYWLNWVKQTPGKGLEWMGRIDPSDSEIHYDQKFKDRVTLTADTSTDTAYMELSSLTSEDTAVYYCALTGIYAMAYWGQGTTVTVSSGGGGSGGGGSGGGGSDIVMTQAPLSLPVTPGEPASISCRSSKSLLHSNGNTYLYWYLQKPGQSPQLLIYRMSNLASGVPDRFSGSGSGTDFTLKISRVEAEDVGVYYCLQHLEYPYTFGQGTKLEIKSGGGGSEVQLVESGGGLVQPGGSLKLSCAASGFTFNKYAMNWVRQAPGKGLEWVARIRSKYNNYATYYADSVKDRFTISRDDSKNTAYLQMNNLKTEDTAVYYCVRHGNFGNSYISYWAYWGQGTLVTVSSGGGGSGGGGSGGGGSQTVVTQEPSLTVSPGGTVTLTCGSSTGAVTSGNYPNWVQQKPGQAPRGLIGGTKFLAPGTPARFSGSLLGGKAALTLSGVQPEDEAEYYCVLWYSNRWVFGGGTKLTVL

SEQ ID NO: 1269 - DNA, 1497 bp, synthetic construct
  misc_feature 1..1497: note = PC17H10 HL X I2C HL
  source 1..1497: mol_type = other DNA
gaggtgcagctggtccagtcaggcgccgaagtgaagaagcctggcgccacagtgaagatatcctgcaaggtcagcggctacaccttcaccaactactggctgaactgggtgaaacagacgcccggcaagggcctggaatggatgggcaggatcgaccccagcgacagcgagatccactacgaccagaagttcaaggacagagtcaccctaaccgcggacacgagcaccgacaccgcctacatggagctgtccagcctgacaagcgaggacaccgccgtgtactattgcgccctgaccggcatctacgccatggcctactggggccagggcaccacggtcaccgtctcctcaggtggtggtggttctggcggcggcggctccggtggtggtggttctgacatcgtgatgacccaggcacctctaagcctgccagtgaccccaggcgagccagcgtccatcagctgcaggtccagcaagagcctgctgcacagcaacggcaacacctacctgtactggtatctgcagaagccaggccagagcccccagctgctgatctacaggatgagcaacctggctagcggcgtgccagacagattcagcggcagcggctctggaaccgacttcaccctgaagatcagcagggtggaggccgaggacgtgggcgtgtactactgcctgcagcacctggaatacccctacaccttcggccaagggaccaagctggaaatcaagtccggaggtggtggatccgaggtgcagctggtcgagtctggaggaggattggtgcagcctggagggtcattgaaactctcatgtgcagcctctggattcaccttcaataagtacgccatgaactgggtccgccaggctccaggaaagggtttggaatgggttgctcgcataagaagtaaatataataattatgcaacatattatgccgattcagtgaaagacaggttcaccatctccagagatgattcaaaaaacactgcctatctacaaatgaacaacttgaaaactgaggacactgccgtgtactactgtgtgagacatgggaacttcggtaatagctacatatcctactgggcttactggggccaagggactctggtcaccgtctcctcaggtggtggtggttctggcggcggcggctccggtggtggtggttctcagactgttgtgactcaggaaccttcactcaccgtatcacctggtggaacagtcacactcacttgtggctcctcgactggggctgttacatctggcaactacccaaactgggtccaacaaaaaccaggtcaggcaccccgtggtctaataggtgggactaagttcctcgcccccggtactcctgccagattctcaggctccctgcttggaggcaaggctgccctcaccctctcaggggtacagccagaggatgaggcagaatattactgtgttctatggtacagcaaccgctgggtgttcggtggaggaaccaaactgactgtccta

SEQ ID NO: 1270 - protein, 124 aa, synthetic construct
  REGION 1..124: note = hCD19 5-A9-H
QVQLVQSGAEVVRPGASVKISCKASGYAFTSYWMNWVRQRPGQGLEWIGQIWPGDGDTNYNGKFKGRVTMTADESTSTAYMELSSLRSEDTAVYYCARRETTTVGRYYYAMDYWGQGTTVTVSS

SEQ ID NO: 1271 - protein, 5 aa, synthetic construct
  REGION 1..5: note = hCD19 5-A9-HCDR1
SYWMN

SEQ ID NO: 1272 - protein, 17 aa, synthetic construct
  REGION 1..17: note = hCD19 5-A9-HCDR2
QIWPGDGDTNYNGKFKG

SEQ ID NO: 1273 - protein, 15 aa, synthetic construct
  REGION 1..15: note = hCD19 5-A9-HCDR3
RETTTVGRYYYAMDY

SEQ ID NO: 1274 - DNA, 372 bp, synthetic construct
  misc_feature 1..372: note = hCD19 5-A9-H
  source 1..372: mol_type = other DNA
caggtgcagctggtccagtctggggctgaggtggtgaggcctggggcctcagtgaagatttcctgcaaggcttctggctatgcattcactagctactggatgaactgggtgaggcagcgccctggacagggtcttgagtggattggacagatttggcctggagatggtgatactaactacaatggaaagttcaagggtagagtcactatgactgctgacgaatccaccagcacagcctacatggaactcagcagcctgcgatctgaggacactgcggtctattactgtgcaagacgggagactacgacggtaggccgttattactatgctatggactactggggccaagggaccacggtcaccgtctcctca

SEQ ID NO: 1275 - protein, 111 aa, synthetic construct
  REGION 1..111: note = hCD19 5-A9-L
DIQMTQSPSSLSVSVGERVTITCKASQSVDYDGTSYLNWYQQKPGQAPKLLIYDASNLVSGVPSRFSGSGSGTDFTLTISSLQKEDFATYYCQQSTEDPWTFGQGTKVEIK

SEQ ID NO: 1276 - protein, 15 aa, synthetic construct
  REGION 1..15: note = hCD19 5-A9-LCDR1
KASQSVDYDGTSYLN

SEQ ID NO: 1277 - protein, 7 aa, synthetic construct
  REGION 1..7: note = hCD19 5-A9-LCDR2
DASNLVS

SEQ ID NO: 1278 - protein, 9 aa, synthetic construct
  REGION 1..9: note = hCD19 5-A9-LCDR3
QQSTEDPWT

SEQ ID NO: 1279 - DNA, 333 bp, synthetic construct
  misc_feature 1..333: note = hCD19 5-A9-L
  source 1..333: mol_type = other DNA
gacatccagatgacccagtctccatcttctttgtctgtgtctgtaggggagagagtcaccatcacctgcaaggccagccaaagtgttgattatgatggtaccagttatttgaactggtaccaacagaaaccaggacaggcacccaaactcctcatctatgatgcatccaatctagtttctggggtcccatccaggtttagtggcagtgggtctgggacagacttcaccctcaccatcagttctctgcagaaggaggatttcgcaacctattactgtcagcaaagtactgaggatccgtggacgttcggtcaagggaccaaggtggagatcaaa

SEQ ID NO: 1280 - protein, 250 aa, synthetic construct
  REGION 1..250: note = hCD19 5-A9-LH
DIQMTQSPSSLSVSVGERVTITCKASQSVDYDGTSYLNWYQQKPGQAPKLLIYDASNLVSGVPSRFSGSGSGTDFTLTISSLQKEDFATYYCQQSTEDPWTFGQGTKVEIKGGGGSGGGGSGGGGSQVQLVQSGAEVVRPGASVKISCKASGYAFTSYWMNWVRQRPGQGLEWIGQIWPGDGDTNYNGKFKGRVTMTADESTSTAYMELSSLRSEDTAVYYCARRETTTVGRYYYAMDYWGQGTTVTVSS

SEQ ID NO: 1281 - DNA, 750 bp, synthetic construct
  misc_feature 1..750: note = hCD19 5-A9-LH
  source 1..750: mol_type = other DNA
gacatccagatgacccagtctccatcttctttgtctgtgtctgtaggggagagagtcaccatcacctgcaaggccagccaaagtgttgattatgatggtaccagttatttgaactggtaccaacagaaaccaggacaggcacccaaactcctcatctatgatgcatccaatctagtttctggggtcccatccaggtttagtggcagtgggtctgggacagacttcaccctcaccatcagttctctgcagaaggaggatttcgcaacctattactgtcagcaaagtactgaggatccgtggacgttcggtcaagggaccaaggtggagatcaaaggtggtggtggttctggcggcggcggctccggtggtggtggttctcaggtgcagctggtccagtctggggctgaggtggtgaggcctggggcctcagtgaagatttcctgcaaggcttctggctatgcattcactagctactggatgaactgggtgaggcagcgccctggacagggtcttgagtggattggacagatttggcctggagatggtgatactaactacaatggaaagttcaagggtagagtcactatgactgctgacgaatccaccagcacagcctacatggaactcagcagcctgcgatctgaggacactgcggtctattactgtgcaagacgggagactacgacggtaggccgttattactatgctatggactactggggccaagggaccacggtcaccgtctcctca

SEQ ID NO: 1282 - protein, 504 aa, synthetic construct
  REGION 1..504: note = hCD19 5-A9 LH x I2C HL
DIQMTQSPSSLSVSVGERVTITCKASQSVDYDGTSYLNWYQQKPGQAPKLLIYDASNLVSGVPSRFSGSGSGTDFTLTISSLQKEDFATYYCQQSTEDPWTFGQGTKVEIKGGGGSGGGGSGGGGSQVQLVQSGAEVVRPGASVKISCKASGYAFTSYWMNWVRQRPGQGLEWIGQIWPGDGDTNYNGKFKGRVTMTADESTSTAYMELSSLRSEDTAVYYCARRETTTVGRYYYAMDYWGQGTTVTVSSGGGGSEVQLVESGGGLVQPGGSLKLSCAASGFTFNKYAMNWVRQAPGKGLEWVARIRSKYNNYATYYADSVKDRFTISRDDSKNTAYLQMNNLKTEDTAVYYCVRHGNFGNSYISYWAYWGQGTLVTVSSGGGGSGGGGSGGGGSQTVVTQEPSLTVSPGGTVTLTCGSSTGAVTSGNYPNWVQQKPGQAPRGLIGGTKFLAPGTPARFSGSLLGGKAALTLSGVQPEDEAEYYCVLWYSNRWVFGGGTKLTVL

SEQ ID NO: 1283 - DNA, 1512 bp, synthetic construct
  misc_feature 1..1512: note = hCD19 5-A9 LH x I2C HL
  source 1..1512: mol_type = other DNA
gacatccagatgacccagtctccatcttctttgtctgtgtctgtaggggagagagtcaccatcacctgcaaggccagccaaagtgttgattatgatggtaccagttatttgaactggtaccaacagaaaccaggacaggcacccaaactcctcatctatgatgcatccaatctagtttctggggtcccatccaggtttagtggcagtgggtctgggacagacttcaccctcaccatcagttctctgcagaaggaggatttcgcaacctattactgtcagcaaagtactgaggatccgtggacgttcggtcaagggaccaaggtggagatcaaaggtggtggtggttctggcggcggcggctccggtggtggtggttctcaggtgcagctggtccagtctggggctgaggtggtgaggcctggggcctcagtgaagatttcctgcaaggcttctggctatgcattcactagctactggatgaactgggtgaggcagcgccctggacagggtcttgagtggattggacagatttggcctggagatggtgatactaactacaatggaaagttcaagggtagagtcactatgactgctgacgaatccaccagcacagcctacatggaactcagcagcctgcgatctgaggacactgcggtctattactgtgcaagacgggagactacgacggtaggccgttattactatgctatggactactggggccaagggaccacggtcaccgtctcctccggaggtggtggatccgaggtgcagctggtcgagtctggaggaggattggtgcagcctggagggtcattgaaactctcatgtgcagcctctggattcaccttcaataagtacgccatgaactgggtccgccaggctccaggaaagggtttggaatgggttgctcgcataagaagtaaatataataattatgcaacatattatgccgattcagtgaaagacaggttcaccatctccagagatgattcaaaaaacactgcctatctacaaatgaacaacttgaaaactgaggacactgccgtgtactactgtgtgagacatgggaacttcggtaatagctacatatcctactgggcttactggggccaagggactctggtcaccgtctcctcaggtggtggtggttctggcggcggcggctccggtggtggtggttctcagactgttgtgactcaggaaccttcactcaccgtatcacctggtggaacagtcacactcacttgtggctcctcgactggggctgttacatctggcaactacccaaactgggtccaacaaaaaccaggtcaggcaccccgtggtctaataggtgggactaagttcctcgcccccggtactcctgccagattctcaggctccctgcttggaggcaaggctgccctcaccctctcaggggtacagccagaggatgaggcagaatattactgtgttctatggtacagcaaccgctgggtgttcggtggaggaaccaaactgactgtccta

SEQ ID NO: 1284 - protein, 124 aa, synthetic construct
  REGION 1..124: note = hCD19 2-C6-H
QVQLVQSGAEVKKPGASVKISCKASGYAFTSYWMNWVRQAPGQGLEWIGQIWPGDGDTNYNGKFKGRVTLTADTSTSTAYMELSSLQSEDTAVYYCARRETTTVGRYYYAMDYWGQGTTVTVSS

SEQ ID NO: 1285 - protein, 5 aa, synthetic construct
  REGION 1..5: note = hCD19 2-C6-HCDR1
SYWMN

SEQ ID NO: 1286 - protein, 17 aa, synthetic construct
  REGION 1..17: note = hCD19 2-C6-HCDR2
QIWPGDGDTNYNGKFKG

SEQ ID NO: 1287 - protein, 15 aa, synthetic construct
  REGION 1..15: note = hCD19 2-C6-HCDR3
RETTTVGRYYYAMDY

SEQ ID NO: 1288 - DNA, 372 bp, synthetic construct
  misc_feature 1..372: note = hCD19 2-C6-H
  source 1..372: mol_type = other DNA
caggtgcagctggtccagtctggggctgaggtgaagaagcctggggcctcagtgaagatttcctgcaaggcttctggctatgcattcactagctactggatgaactgggtgaggcaggcccctggacagggtcttgagtggattggacagatttggcctggagatggtgatactaactacaatggaaagttcaagggtagagtcactctgactgctgacacatccaccagcacagcctacatggaactcagcagcctacaatctgaggacactgcggtctattactgtgcaagacgggagactacgacggtaggccgttattactatgctatggactactggggccaagggaccacggtcaccgtctcctca

SEQ ID NO: 1289 - protein, 111 aa, synthetic construct
  REGION 1..111: note = hCD19 2-C6-L
DIQMTQSPSSLSASVGERVTITCKASQSVDYDGSSYLNWYQQKPGKAPKLLIYDASNLVSGVPPRFSGSGSGTDFTLTIHSLQPEDFATYYCQQSTEDPWTFGQGTKVEIK

SEQ ID NO: 1290 - protein, 15 aa, synthetic construct
  REGION 1..15: note = hCD19 2-C6-LCDR1
KASQSVDYDGSSYLN

SEQ ID NO: 1291 - protein, 7 aa, synthetic construct
  REGION 1..7: note = hCD19 2-C6-LCDR2
DASNLVS

SEQ ID NO: 1292 - protein, 9 aa, synthetic construct
  REGION 1..9: note = hCD19 2-C6-LCDR3
QQSTEDPWT

SEQ ID NO: 1293 - DNA, 333 bp, synthetic construct
  misc_feature 1..333: note = hCD19 2-C6-L
  source 1..333: mol_type = other DNA
gacatccagatgacccagtctccatcttctttgtctgcgtctgtaggggagagagtcaccatcacctgcaaggccagccaaagtgttgattatgatggttcgagttatttgaactggtaccaacagaaaccaggaaaggcacccaaactcctcatctatgatgcatccaatctagtttctggggtcccacccaggtttagtggcagtgggtctgggacagacttcaccctcaccatccattctctgcagccggaggatttcgcaacctattactgtcagcaaagtactgaggatccgtggacgttcggtcaagggaccaaggtggagatcaaa

SEQ ID NO: 1294 - protein, 250 aa, synthetic construct
  REGION 1..250: note = hCD19 2-C6-LH
DIQMTQSPSSLSASVGERVTITCKASQSVDYDGSSYLNWYQQKPGKAPKLLIYDASNLVSGVPPRFSGSGSGTDFTLTIHSLQPEDFATYYCQQSTEDPWTFGQGTKVEIKGGGGSGGGGSGGGGSQVQLVQSGAEVKKPGASVKISCKASGYAFTSYWMNWVRQAPGQGLEWIGQIWPGDGDTNYNGKFKGRVTLTADTSTSTAYMELSSLQSEDTAVYYCARRETTTVGRYYYAMDYWGQGTTVTVSS

SEQ ID NO: 1295 - DNA, 750 bp, synthetic construct
  misc_feature 1..750: note = hCD19 2-C6-LH
  source 1..750: mol_type = other DNA
gacatccagatgacccagtctccatcttctttgtctgcgtctgtaggggagagagtcaccatcacctgcaaggccagccaaagtgttgattatgatggttcgagttatttgaactggtaccaacagaaaccaggaaaggcacccaaactcctcatctatgatgcatccaatctagtttctggggtcccacccaggtttagtggcagtgggtctgggacagacttcaccctcaccatccattctctgcagccggaggatttcgcaacctattactgtcagcaaagtactgaggatccgtggacgttcggtcaagggaccaaggtggagatcaaaggtggtggtggttctggcggcggcggctccggtggtggtggttctcaggtgcagctggtccagtctggggctgaggtgaagaagcctggggcctcagtgaagatttcctgcaaggcttctggctatgcattcactagctactggatgaactgggtgaggcaggcccctggacagggtcttgagtggattggacagatttggcctggagatggtgatactaactacaatggaaagttcaagggtagagtcactctgactgctgacacatccaccagcacagcctacatggaactcagcagcctacaatctgaggacactgcggtctattactgtgcaagacgggagactacgacggtaggccgttattactatgctatggactactggggccaagggaccacggtcaccgtctcctca

SEQ ID NO: 1296 - protein, 504 aa, synthetic construct
  REGION 1..504: note = hCD19 2-C6 LH x I2C HL
DIQMTQSPSSLSASVGERVTITCKASQSVDYDGSSYLNWYQQKPGKAPKLLIYDASNLVSGVPPRFSGSGSGTDFTLTIHSLQPEDFATYYCQQSTEDPWTFGQGTKVEIKGGGGSGGGGSGGGGSQVQLVQSGAEVKKPGASVKISCKASGYAFTSYWMNWVRQAPGQGLEWIGQIWPGDGDTNYNGKFKGRVTLTADTSTSTAYMELSSLQSEDTAVYYCARRETTTVGRYYYAMDYWGQGTTVTVSSGGGGSEVQLVESGGGLVQPGGSLKLSCAASGFTFNKYAMNWVRQAPGKGLEWVARIRSKYNNYATYYADSVKDRFTISRDDSKNTAYLQMNNLKTEDTAVYYCVRHGNFGNSYISYWAYWGQGTLVTVSSGGGGSGGGGSGGGGSQTVVTQEPSLTVSPGGTVTLTCGSSTGAVTSGNYPNWVQQKPGQAPRGLIGGTKFLAPGTPARFSGSLLGGKAALTLSGVQPEDEAEYYCVLWYSNRWVFGGGTKLTVL

SEQ ID NO: 1297 - DNA, 1512 bp, synthetic construct
  misc_feature 1..1512: note = hCD19 2-C6 LH x I2C HL
  source 1..1512: mol_type = other DNA
gacatccagatgacccagtctccatcttctttgtctgcgtctgtaggggagagagtcaccatcacctgcaaggccagccaaagtgttgattatgatggttcgagttatttgaactggtaccaacagaaaccaggaaaggcacccaaactcctcatctatgatgcatccaatctagtttctggggtcccacccaggtttagtggcagtgggtctgggacagacttcaccctcaccatccattctctgcagccggaggatttcgcaacctattactgtcagcaaagtactgaggatccgtggacgttcggtcaagggaccaaggtggagatcaaaggtggtggtggttctggcggcggcggctccggtggtggtggttctcaggtgcagctggtccagtctggggctgaggtgaagaagcctggggcctcagtgaagatttcctgcaaggcttctggctatgcattcactagctactggatgaactgggtgaggcaggcccctggacagggtcttgagtggattggacagatttggcctggagatggtgatactaactacaatggaaagttcaagggtagagtcactctgactgctgacacatccaccagcacagcctacatggaactcagcagcctacaatctgaggacactgcggtctattactgtgcaagacgggagactacgacggtaggccgttattactatgctatggactactggggccaagggaccacggtcaccgtctcctccggaggtggtggatccgaggtgcagctggtcgagtctggaggaggattggtgcagcctggagggtcattgaaactctcatgtgcagcctctggattcaccttcaataagtacgccatgaactgggtccgccaggctccaggaaagggtttggaatgggttgctcgcataagaagtaaatataataattatgcaacatattatgccgattcagtgaaagacaggttcaccatctccagagatgattcaaaaaacactgcctatctacaaatgaacaacttgaaaactgaggacactgccgtgtactactgtgtgagacatgggaacttcggtaatagctacatatcctactgggcttactggggccaagggactctggtcaccgtctcctcaggtggtggtggttctggcggcggcggctccggtggtggtggttctcagactgttgtgactcaggaaccttcactcaccgtatcacctggtggaacagtcacactcacttgtggctcctcgactggggctgttacatctggcaactacccaaactgggtccaacaaaaaccaggtcaggcaccccgtggtctaataggtgggactaagttcctcgcccccggtactcctgccagattctcaggctccctgcttggaggcaaggctgccctcaccctctcaggggtacagccagaggatgaggcagaatattactgtgttctatggtacagcaaccgctgggtgttcggtggaggaaccaaactgactgtccta

SEQ ID NO: 1298 - protein, 124 aa, synthetic construct
  REGION 1..124: note = hCD19 4-C7-H
QVQLVQSGAEVVKPGASVKISCKASGYAFTSYWMNWVRQRPGQGLEWIGQIWPGDGDTNYNGKFKGRVTMTADESTSTAYMELSSLRSEDTAVYYCARRETTTVGRYYYAMDYWGQGTTVTVSS

SEQ ID NO: 1299 - protein, 5 aa, synthetic construct
  REGION 1..5: note = hCD19 4-C7-HCDR1
SYWMN

SEQ ID NO: 1300 - protein, 17 aa, synthetic construct
  REGION 1..17: note = hCD19 4-C7-HCDR2
QIWPGDGDTNYNGKFKG

SEQ ID NO: 1301 - protein, 15 aa, synthetic construct
  REGION 1..15: note = hCD19 4-C7-HCDR3
RETTTVGRYYYAMDY

SEQ ID NO: 1302 - DNA, 372 bp, synthetic construct
  misc_feature 1..372: note = hCD19 4-C7-H
  source 1..372: mol_type = other DNA
caggtgcagctggtccagtctggggctgaggtggtgaagcctggggcctcagtgaagatttcctgcaaggcttctggctatgcattcactagctactggatgaactgggtgaggcagcgccctggacagggtcttgagtggattggacagatttggcctggagatggtgatactaactacaatggaaagttcaagggtagagtcactatgactgctgacgaatccaccagcacagcctacatggaactcagcagcctgcgatctgaggacactgcggtctattactgtgcaagacgggagactacgacggtaggccgttattactatgctatggactactggggccaagggaccacggtcaccgtctcctca

SEQ ID NO: 1303 - protein, 111 aa, synthetic construct
  REGION 1..111: note = hCD19 4-C7-L
DIQMTQSPSSLSASLGDRVTITCKASQSVDYDGTSYLNWYQQKPGQPPKLLIYDASNLVSGVPSRFSGSGSGTDFTLTISPLEQEDFATYYCQQSTEDPWTFGQGTKVEIK

SEQ ID NO: 1304 - protein, 15 aa, synthetic construct
  REGION 1..15: note = hCD19 4-C7-LCDR1
KASQSVDYDGSSYLN

SEQ ID NO: 1305 - protein, 7 aa, synthetic construct
  REGION 1..7: note = hCD19 4-C7-LCDR2
DASNLVS

SEQ ID NO: 1306 - protein, 9 aa, synthetic construct
  REGION 1..9: note = hCD19 4-C7-LCDR3
QQSTEDPWT

SEQ ID NO: 1307 - DNA, 333 bp, synthetic construct
  misc_feature 1..333: note = hCD19 4-C7-L
  source 1..333: mol_type = other DNA
gacatccagatgacccagtctccatcttctttgtctgcgtctctaggggacagagtcaccatcacctgcaaggccagccaaagtgttgattatgatggtacgagttatttgaactggtaccaacagaaaccaggacagccacccaaactcctcatctatgatgcatccaatctagtttctggggtcccatccaggtttagtggcagtgggtctgggacagacttcaccctcaccatcagtcctctggagcaggaggatttcgcaacctattactgtcagcaaagtactgaggatccgtggacgttcggtcaagggaccaaggtggagatcaaa

SEQ ID NO: 1308 - protein, 250 aa, synthetic construct
  REGION 1..250: note = hCD19 4-C7-LH
DIQMTQSPSSLSASLGDRVTITCKASQSVDYDGTSYLNWYQQKPGQPPKLLIYDASNLVSGVPSRFSGSGSGTDFTLTISPLEQEDFATYYCQQSTEDPWTFGQGTKVEIKGGGGSGGGGSGGGGSQVQLVQSGAEVVKPGASVKISCKASGYAFTSYWMNWVRQRPGQGLEWIGQIWPGDGDTNYNGKFKGRVTMTADESTSTAYMELSSLRSEDTAVYYCARRETTTVGRYYYAMDYWGQGTTVTVSS

SEQ ID NO: 1309 - DNA, 750 bp, synthetic construct
  misc_feature 1..750: note = hCD19 4-C7-LH
  source 1..750: mol_type = other DNA
gacatccagatgacccagtctccatcttctttgtctgcgtctctaggggacagagtcaccatcacctgcaaggccagccaaagtgttgattatgatggtacgagttatttgaactggtaccaacagaaaccaggacagccacccaaactcctcatctatgatgcatccaatctagtttctggggtcccatccaggtttagtggcagtgggtctgggacagacttcaccctcaccatcagtcctctggagcaggaggatttcgcaacctattactgtcagcaaagtactgaggatccgtggacgttcggtcaagggaccaaggtggagatcaaaggtggtggtggttctggcggcggcggctccggtggtggtggttctcaggtgcagctggtccagtctggggctgaggtggtgaagcctggggcctcagtgaagatttcctgcaaggcttctggctatgcattcactagctactggatgaactgggtgaggcagcgccctggacagggtcttgagtggattggacagatttggcctggagatggtgatactaactacaatggaaagttcaagggtagagtcactatgactgctgacgaatccaccagcacagcctacatggaactcagcagcctgcgatctgaggacactgcggtctattactgtgcaagacgggagactacgacggtaggccgttattactatgctatggactactggggccaagggaccacggtcaccgtctcctca

SEQ ID NO: 1310 - protein, 504 aa, synthetic construct
  REGION 1..504: note = hCD19 4-C7 LH x I2C HL
DIQMTQSPSSLSASLGDRVTITCKASQSVDYDGTSYLNWYQQKPGQPPKLLIYDASNLVSGVPSRFSGSGSGTDFTLTISPLEQEDFATYYCQQSTEDPWTFGQGTKVEIKGGGGSGGGGSGGGGSQVQLVQSGAEVVKPGASVKISCKASGYAFTSYWMNWVRQRPGQGLEWIGQIWPGDGDTNYNGKFKGRVTMTADESTSTAYMELSSLRSEDTAVYYCARRETTTVGRYYYAMDYWGQGTTVTVSSGGGGSEVQLVESGGGLVQPGGSLKLSCAASGFTFNKYAMNWVRQAPGKGLEWVARIRSKYNNYATYYADSVKDRFTISRDDSKNTAYLQMNNLKTEDTAVYYCVRHGNFGNSYISYWAYWGQGTLVTVSSGGGGSGGGGSGGGGSQTVVTQEPSLTVSPGGTVTLTCGSSTGAVTSGNYPNWVQQKPGQAPRGLIGGTKFLAPGTPARFSGSLLGGKAALTLSGVQPEDEAEYYCVLWYSNRWVFGGGTKLTVL

SEQ ID NO: 1311 - DNA, 1512 bp, synthetic construct
  misc_feature 1..1512: note = hCD19 4-C7 LH x I2C HL
  source 1..1512: mol_type = other DNA
gacatccagatgacccagtctccatcttctttgtctgcgtctctaggggacagagtcaccatcacctgcaaggccagccaaagtgttgattatgatggtacgagttatttgaactggtaccaacagaaaccaggacagccacccaaactcctcatctatgatgcatccaatctagtttctggggtcccatccaggtttagtggcagtgggtctgggacagacttcaccctcaccatcagtcctctggagcaggaggatttcgcaacctattactgtcagcaaagtactgaggatccgtggacgttcggtcaagggaccaaggtggagatcaaaggtggtggtggttctggcggcggcggctccggtggtggtggttctcaggtgcagctggtccagtctggggctgaggtggtgaagcctggggcctcagtgaagatttcctgcaaggcttctggctatgcattcactagctactggatgaactgggtgaggcagcgccctggacagggtcttgagtggattggacagatttggcctggagatggtgatactaactacaatggaaagttcaagggtagagtcactatgactgctgacgaatccaccagcacagcctacatggaactcagcagcctgcgatctgaggacactgcggtctattactgtgcaagacgggagactacgacggtaggccgttattactatgctatggactactggggccaagggaccacggtcaccgtctcctccggaggtggtggatccgaggtgcagctggtcgagtctggaggaggattggtgcagcctggagggtcattgaaactctcatgtgcagcctctggattcaccttcaataagtacgccatgaactgggtccgccaggctccaggaaagggtttggaatgggttgctcgcataagaagtaaatataataattatgcaacatattatgccgattcagtgaaagacaggttcaccatctccagagatgattcaaaaaacactgcctatctacaaatgaacaacttgaaaactgaggacactgccgtgtactactgtgtgagacatgggaacttcggtaatagctacatatcctactgggcttactggggccaagggactctggtcaccgtctcctcaggtggtggtggttctggcggcggcggctccggtggtggtggttctcagactgttgtgactcaggaaccttcactcaccgtatcacctggtggaacagtcacactcacttgtggctcctcgactggggctgttacatctggcaactacccaaactgggtccaacaaaaaccaggtcaggcaccccgtggtctaataggtgggactaagttcctcgcccccggtactcctgccagattctcaggctccctgcttggaggcaaggctgccctcaccctctcaggggtacagccagaggatgaggcagaatattactgtgttctatggtacagcaaccgctgggtgttcggtggaggaaccaaactgactgtccta

SEQ ID NO: 1312 - protein, 124 aa, synthetic construct; identical to SEQ ID NO: 1298
  REGION 1..124: note = hCD19 2-D7-H

SEQ ID NO: 1313 - protein, 5 aa, synthetic construct
  REGION 1..5: note = hCD19 2-D7-HCDR1
SYWMN

SEQ ID NO: 1314 - protein, 17 aa, synthetic construct
  REGION 1..17: note = hCD19 2-D7-HCDR2
QIWPGDGDTNYNGKFKG

SEQ ID NO: 1315 - protein, 15 aa, synthetic construct
  REGION 1..15: note = hCD19 2-D7-HCDR3
RETTTVGRYYYAMDY

SEQ ID NO: 1316 - DNA, 372 bp, synthetic construct; identical to SEQ ID NO: 1302
  misc_feature 1..372: note = hCD19 2-D7-H
  source 1..372: mol_type = other DNA

SEQ ID NO: 1317 - protein, 111 aa, synthetic construct; identical to SEQ ID NO: 1289
  REGION 1..111: note = hCD19 2-D7-L

SEQ ID NO: 1318 - protein, 15 aa, synthetic construct
  REGION 1..15: note = hCD19 2-D7-LCDR1
KASQSVDYDGSSYLN

SEQ ID NO: 1319 - protein, 7 aa, synthetic construct
  REGION 1..7: note = hCD19 2-D7-LCDR2
DASNLVS

SEQ ID NO: 1320 - protein, 9 aa, synthetic construct
  REGION 1..9: note = hCD19 2-D7-LCDR3
QQSTEDPWT

SEQ ID NO: 1321 - DNA, 333 bp, synthetic construct; identical to SEQ ID NO: 1293
  misc_feature 1..333: note = hCD19 2-D7-L
  source 1..333: mol_type = other DNA

SEQ ID NO: 1322 - protein, 250 aa, synthetic construct
  REGION 1..250: note = hCD19 2-D7-LH
DIQMTQSPSSLSASVGERVTITCKASQSVDYDGSSYLNWYQQKPGKAPKLLIYDASNLVSGVPPRFSGSGSGTDFTLTIHSLQPEDFATYYCQQSTEDPWTFGQGTKVEIKGGGGSGGGGSGGGGSQVQLVQSGAEVVKPGASVKISCKASGYAFTSYWMNWVRQRPGQGLEWIGQIWPGDGDTNYNGKFKGRVTMTADESTSTAYMELSSLRSEDTAVYYCARRETTTVGRYYYAMDYWGQGTTVTVSS

SEQ ID NO: 1323 - DNA, 750 bp, synthetic construct
  misc_feature 1..750: note = hCD19 2-D7-LH
  source 1..750: mol_type = other DNA
gacatccagatgacccagtctccatcttctttgtctgcgtctgtaggggagagagtcaccatcacctgcaaggccagccaaagtgttgattatgatggttcgagttatttgaactggtaccaacagaaaccaggaaaggcacccaaactcctcatctatgatgcatccaatctagtttctggggtcccacccaggtttagtggcagtgggtctgggacagacttcaccctcaccatccattctctgcagccggaggatttcgcaacctattactgtcagcaaagtactgaggatccgtggacgttcggtcaagggaccaaggtggagatcaaaggtggtggtggttctggcggcggcggctccggtggtggtggttctcaggtgcagctggtccagtctggggctgaggtggtgaagcctggggcctcagtgaagatttcctgcaaggcttctggctatgcattcactagctactggatgaactgggtgaggcagcgccctggacagggtcttgagtggattggacagatttggcctggagatggtgatactaactacaatggaaagttcaagggtagagtcactatgactgctgacgaatccaccagcacagcctacatggaactcagcagcctgcgatctgaggacactgcggtctattactgtgcaagacgggagactacgacggtaggccgttattactatgctatggactactggggccaagggaccacggtcaccgtctcctca

SEQ ID NO: 1324 - protein, 504 aa, synthetic construct
  REGION 1..504: note = hCD19 2-D7 LH x I2C HL
DIQMTQSPSSLSASVGERVTITCKASQSVDYDGSSYLNWYQQKPGKAPKLLIYDASNLVSGVPPRFSGSGSGTDFTLTIHSLQPEDFATYYCQQSTEDPWTFGQGTKVEIKGGGGSGGGGSGGGGSQVQLVQSGAEVVKPGASVKISCKASGYAFTSYWMNWVRQRPGQGLEWIGQIWPGDGDTNYNGKFKGRVTMTADESTSTAYMELSSLRSEDTAVYYCARRETTTVGRYYYAMDYWGQGTTVTVSSGGGGSEVQLVESGGGLVQPGGSLKLSCAASGFTFNKYAMNWVRQAPGKGLEWVARIRSKYNNYATYYADSVKDRFTISRDDSKNTAYLQMNNLKTEDTAVYYCVRHGNFGNSYISYWAYWGQGTLVTVSSGGGGSGGGGSGGGGSQTVVTQEPSLTVSPGGTVTLTCGSSTGAVTSGNYPNWVQQKPGQAPRGLIGGTKFLAPGTPARFSGSLLGGKAALTLSGVQPEDEAEYYCVLWYSNRWVFGGGTKLTVL

SEQ ID NO: 1325 - DNA, 1512 bp, synthetic construct
  misc_feature 1..1512: note = hCD19 2-D7 LH x I2C HL
  source 1..1512: mol_type = other DNA
gacatccagatgacccagtctccatcttctttgtctgcgtctgtaggggagagagtcaccatcacctgcaaggccagccaaagtgttgattatgatggttcgagttatttgaactggtaccaacagaaaccaggaaaggcacccaaactcctcatctatgatgcatccaatctagtttctggggtcccacccaggtttagtggcagtgggtctgggacagacttcaccctcaccatccattctctgcagccggaggatttcgcaacctattactgtcagcaaagtactgaggatccgtggacgttcggtcaagggaccaaggtggagatcaaaggtggtggtggttctggcggcggcggctccggtggtggtggttctcaggtgcagctggtccagtctggggctgaggtggtgaagcctggggcctcagtgaagatttcctgcaaggcttctggctatgcattcactagctactggatgaactgggtgaggcagcgccctggacagggtcttgagtggattggacagatttggcctggagatggtgatactaactacaatggaaagttcaagggtagagtcactatgactgctgacgaatccaccagcacagcctacatggaactcagcagcctgcgatctgaggacactgcggtctattactgtgcaagacgggagactacgacggtaggccgttattactatgctatggactactggggccaagggaccacggtcaccgtctcctccggaggtggtggatccgaggtgcagctggtcgagtctggaggaggattggtgcagcctggagggtcattgaaactctcatgtgcagcctctggattcaccttcaataagtacgccatgaactgggtccgccaggctccaggaaagggtttggaatgggttgctcgcataagaagtaaatataataattatgcaacatattatgccgattcagtgaaagacaggttcaccatctccagagatgattcaaaaaacactgcctatctacaaatgaacaacttgaaaactgaggacactgccgtgtactactgtgtgagacatgggaacttcggtaatagctacatatcctactgggcttactggggccaagggactctggtcaccgtctcctcaggtggtggtggttctggcggcggcggctccggtggtggtggttctcagactgttgtgactcaggaaccttcactcaccgtatcacctggtggaacagtcacactcacttgtggctcctcgactggggctgttacatctggcaactacccaaactgggtccaacaaaaaccaggtcaggcaccccgtggtctaataggtgggactaagttcctcgcccccggtactcctgccagattctcaggctccctgcttggaggcaaggctgccctcaccctctcaggggtacagccagaggatgaggcagaatattactgtgttctatggtacagcaaccgctgggtgttcggtggaggaaccaaactgactgtccta

SEQ ID NO: 1326 - protein, 124 aa, synthetic construct; identical to SEQ ID NO: 1298
  REGION 1..124: note = hCD19 2-D4-H

SEQ ID NO: 1327 - protein, 5 aa, synthetic construct
  REGION 1..5: note = hCD19 2-D4-HCDR1
SYWMN

SEQ ID NO: 1328 - protein, 17 aa, synthetic construct
  REGION 1..17: note = hCD19 2-D4-HCDR2
QIWPGDGDTNYNGKFKG

SEQ ID NO: 1329 - protein, 15 aa, synthetic construct
  REGION 1..15: note = hCD19 2-D4-HCDR3
RETTTVGRYYYAMDY

SEQ ID NO: 1330 - DNA, 372 bp, synthetic construct; identical to SEQ ID NO: 1302
  misc_feature 1..372: note = hCD19 2-D4-H
  source 1..372: mol_type = other DNA

SEQ ID NO: 1331 - protein, 111 aa, synthetic construct
  REGION 1..111: note = hCD19 2-D4-L
DIQMTQSPASLSVSVGERVTITCKASQSVDYDGTSYLNWYQQKPGQAPKLLIYDASNLVSGVPSRFSGSGSGTDFTLTISSLQPEDFATYYCQQSTEDPWTFGQGTKVEIK

SEQ ID NO: 1332 - protein, 15 aa, synthetic construct
  REGION 1..15: note = hCD19 2-D4-LCDR1
KASQSVDYDGSSYLN

SEQ ID NO: 1333 - protein, 7 aa, synthetic construct
  REGION 1..7: note = hCD19 2-D4-LCDR2
DASNLVS

SEQ ID NO: 1334 - protein, 9 aa, synthetic construct
  REGION 1..9: note = hCD19 2-D4-LCDR3
QQSTEDPWT

SEQ ID NO: 1335 - DNA, 333 bp, synthetic construct
  misc_feature 1..333: note = hCD19 2-D4-L
  source 1..333: mol_type = other DNA
gacatccagatgacccagtctccagcttctttgtctgtgtctgtaggggagagagtcaccatcacctgcaaggccagccaaagtgttgattatgatggtaccagttatttgaactggtaccaacagaaaccaggacaggcacccaaactcctcatctatgatgcatccaatctagtttctggggtcccatccaggtttagtggcagtgggtctgggacagacttcaccctcaccatcagttctctgcagccggaggatttcgcaacctattactgtcagcaaagtactgaggatccgtggacgttcggtcaagggaccaaggtggagatcaaa

SEQ ID NO: 1336 - protein, 250 aa, synthetic construct
  REGION 1..250: note = hCD19 2-D4-LH
DIQMTQSPASLSVSVGERVTITCKASQSVDYDGTSYLNWYQQKPGQAPKLLIYDASNLVSGVPSRFSGSGSGTDFTLTISSLQPEDFATYYCQQSTEDPWTFGQGTKVEIKGGGGSGGGGSGGGGSQVQLVQSGAEVVKPGASVKISCKASGYAFTSYWMNWVRQRPGQGLEWIGQIWPGDGDTNYNGKFKGRVTMTADESTSTAYMELSSLRSEDTAVYYCARRETTTVGRYYYAMDYWGQGTTVTVSS

SEQ ID NO: 1337 - DNA, 750 bp, synthetic construct
  misc_feature 1..750: note = hCD19 2-D4-LH
  source 1..750: mol_type = other DNA
gacatccagatgacccagtctccagcttctttgtctgtgtctgtaggggagagagtcaccatcacctgcaaggccagccaaagtgttgattatgatggtaccagttatttgaactggtaccaacagaaaccaggacaggcacccaaactcctcatctatgatgcatccaatctagtttctggggtcccatccaggtttagtggcagtgggtctgggacagacttcaccctcaccatcagttctctgcagccggaggatttcgcaacctattactgtcagcaaagtactgaggatccgtggacgttcggtcaagggaccaaggtggagatcaaaggtggtggtggttctggcggcggcggctccggtggtggtggttctcaggtgcagctggtccagtctggggctgaggtggtgaagcctggggcctcagtgaagatttcctgcaaggcttctggctatgcattcactagctactggatgaactgggtgaggcagcgccctggacagggtcttgagtggattggacagatttggcctggagatggtgatactaactacaatggaaagttcaagggtagagtcactatgactgctgacgaatccaccagcacagcctacatggaactcagcagcctgcgatctgaggacactgcggtctattactgtgcaagacgggagactacgacggtaggccgttattactatgctatggactactggggccaagggaccacggtcaccgtctcctca

SEQ ID NO: 1338 - protein, 504 aa, synthetic construct
  REGION 1..504: note = hCD19 2-D4 LH x I2C HL
DIQMTQSPASLSVSVGERVTITCKASQSVDYDGTSYLNWYQQKPGQAPKLLIYDASNLVSGVPSRFSGSGSGTDFTLTISSLQPEDFATYYCQQSTEDPWTFGQGTKVEIKGGGGSGGGGSGGGGSQVQLVQSGAEVVKPGASVKISCKASGYAFTSYWMNWVRQRPGQGLEWIGQIWPGDGDTNYNGKFKGRVTMTADESTSTAYMELSSLRSEDTAVYYCARRETTTVGRYYYAMDYWGQGTTVTVSSGGGGSEVQLVESGGGLVQPGGSLKLSCAASGFTFNKYAMNWVRQAPGKGLEWVARIRSKYNNYATYYADSVKDRFTISRDDSKNTAYLQMNNLKTEDTAVYYCVRHGNFGNSYISYWAYWGQGTLVTVSSGGGGSGGGGSGGGGSQTVVTQEPSLTVSPGGTVTLTCGSSTGAVTSGNYPNWVQQKPGQAPRGLIGGTKFLAPGTPARFSGSLLGGKAALTLSGVQPEDEAEYYCVLWYSNRWVFGGGTKLTVL

SEQ ID NO: 1339 - DNA, 1512 bp, synthetic construct
  misc_feature 1..1512: note = hCD19 2-D4 LH x I2C HL
  source 1..1512: mol_type = other DNA
gacatccagatgacccagtctccagcttctttgtctgtgtctgtaggggagagagtcaccatcacctgcaaggccagccaaagtgttgattatgatggtaccagttatttgaactggtaccaacagaaaccaggacaggcacccaaactcctcatctatgatgcatccaatctagtttctggggtcccatccaggtttagtggcagtgggtctgggacagacttcaccctcaccatcagttctctgcagccggaggatttcgcaacctattactgtcagcaaagtactgaggatccgtggacgttcggtcaagggaccaaggtggagatcaaaggtggtggtggttctggcggcggcggctccggtggtggtggttctcaggtgcagctggtccagtctggggctgaggtggtgaagcctggggcctcagtgaagatttcctgcaaggcttctggctatgcattcactagctactggatgaactgggtgaggcagcgccctggacagggtcttgagtggattggacagatttggcctggagatggtgatactaactacaatggaaagttcaagggtagagtcactatgactgctgacgaatccaccagcacagcctacatggaactcagcagcctgcgatctgaggacactgcggtctattactgtgcaagacgggagactacgacggtaggccgttattactatgctatggactactggggccaagggaccacggtcaccgtctcctccggaggtggtggatccgaggtgcagctggtcgagtctggaggaggattggtgcagcctggagggtcattgaaactctcatgtgcagcctctggattcaccttcaataagtacgccatgaactgggtccgccaggctccaggaaagggtttggaatgggttgctcgcataagaagtaaatataataattatgcaacatattatgccgattcagtgaaagacaggttcaccatctccagagatgattcaaaaaacactgcctatctacaaatgaacaacttgaaaactgaggacactgccgtgtactactgtgtgagacatgggaacttcggtaatagctacatatcctactgggcttactggggccaagggactctggtcaccgtctcctcaggtggtggtggttctggcggcggcggctccggtggtggtggttctcagactgttgtgactcaggaaccttcactcaccgtatcacctggtggaacagtcacactcacttgtggctcctcgactggggctgttacatctggcaactacccaaactgggtccaacaaaaaccaggtcaggcaccccgtggtctaataggtgggactaagttcctcgcccccggtactcctgccagattctcaggctccctgcttggaggcaaggctgccctcaccctctcaggggtacagccagaggatgaggcagaatattactgtgttctatggtacagcaaccgctgggtgttcggtggaggaaccaaactgactgtccta

SEQ ID NO: 1340 - protein, 124 aa, synthetic construct; identical to SEQ ID NO: 1298
  REGION 1..124: note = hCD19 5-G3-H

SEQ ID NO: 1341 - protein, 5 aa, synthetic construct
  REGION 1..5: note = hCD19 5-G3-HCDR1
SYWMN

SEQ ID NO: 1342 - protein, 17 aa, synthetic construct
  REGION 1..17: note = hCD19 5-G3-HCDR2
QIWPGDGDTNYNGKFKG

SEQ ID NO: 1343 - protein, 15 aa, synthetic construct
  REGION 1..15: note = hCD19 5-G3-HCDR3
RETTTVGRYYYAMDY

SEQ ID NO: 1344 - DNA, 372 bp, synthetic construct; identical to SEQ ID NO: 1302
  misc_feature 1..372: note = hCD19 5-G3-H
  source 1..372: mol_type = other DNA

SEQ ID NO: 1345 - protein, 111 aa, synthetic construct
  REGION 1..111: note = hCD19 5-G3-L
DIQMTQSPSSLSASVGDRVTITCKASQSVDYDGLSYLNWYQQKPGQAPKLLIYDASNLVSGIPSRFSGSGSGTDFTLTISSLEPEDFATYYCQQSTEDPWTFGQGTKVEIK

SEQ ID NO: 1346 - protein, 15 aa, synthetic construct
  REGION 1..15: note = hCD19 5-G3-LCDR1
KASQSVDYDGSSYLN

SEQ ID NO: 1347 - protein, 7 aa, synthetic construct
  REGION 1..7: note = hCD19 5-G3-LCDR2
DASNLVS

SEQ ID NO: 1348 - protein, 9 aa, synthetic construct
  REGION 1..9: note = hCD19 5-G3-LCDR3
QQSTEDPWT

SEQ ID NO: 1349 - DNA, 333 bp, synthetic construct
  misc_feature 1..333: note = hCD19 5-G3-L
  source 1..333: mol_type = other DNA
gacatccagatgacccagtctccatcttctttgtctgcgtctgtaggggacagagtcaccatcacctgcaaggccagccaaagtgttgattatgatggtctcagttatttgaactggtaccaacagaaaccaggacaggcacccaaactcctcatctatgatgcatccaatctagtttctgggatcccatccaggtttagtggcagtgggtctgggacagacttcaccctcaccatcagttctctggagccggaggatttcgcaacctattactgtcagcaaagtactgaggatccgtggacgttcggtcaagggaccaaggtggagatcaaa

SEQ ID NO: 1350 - protein, 250 aa, synthetic construct
  REGION 1..250: note = hCD19 5-G3-LH
DIQMTQSPSSLSASVGDRVTITCKASQSVDYDGLSYLNWYQQKPGQAPKLLIYDASNLVSGIPSRFSGSGSGTDFTLTISSLEPEDFATYYCQQSTEDPWTFGQGTKVEIKGGGGSGGGGSGGGGSQVQLVQSGAEVVKPGASVKISCKASGYAFTSYWMNWVRQRPGQGLEWIGQIWPGDGDTNYNGKFKGRVTMTADESTSTAYMELSSLRSEDTAVYYCARRETTTVGRYYYAMDYWGQGTTVTVSS

SEQ ID NO: 1351 - DNA, 750 bp, synthetic construct
  misc_feature 1..750: note = hCD19 5-G3-LH
  source 1..750: mol_type = other DNA
gacatccagatgacccagtctccatcttctttgtctgcgtctgtaggggacagagtcaccatcacctgcaaggccagccaaagtgttgattatgatggtctcagttatttgaactggtaccaacagaaaccaggacaggcacccaaactcctcatctatgatgcatccaatctagtttctgggatcccatccaggtttagtggcagtgggtctgggacagacttcaccctcaccatcagttctctggagccggaggatttcgcaacctattactgtcagcaaagtactgaggatccgtggacgttcggtcaagggaccaaggtggagatcaaaggtggtggtggttctggcggcggcggctccggtggtggtggttctcaggtgcagctggtccagtctggggctgaggtggtgaagcctggggcctcagtgaagatttcctgcaaggcttctggctatgcattcactagctactggatgaactgggtgaggcagcgccctggacagggtcttgagtggattggacagatttggcctggagatggtgatactaactacaatggaaagttcaagggtagagtcactatgactgctgacgaatccaccagcacagcctacatggaactcagcagcctgcgatctgaggacactgcggtctattactgtgcaagacgggagactacgacggtaggccgttattactatgctatggactactggggccaagggaccacggtcaccgtctcctca

SEQ ID NO: 1352 - protein, 504 aa, synthetic construct
  REGION 1..504: note = hCD19 5-G3 LH x I2C HL
DIQMTQSPSSLSASVGDRVTITCKASQSVDYDGLSYLNWYQQKPGQAPKLLIYDASNLVSGIPSRFSGSGSGTDFTLTISSLEPEDFATYYCQQSTEDPWTFGQGTKVEIKGGGGSGGGGSGGGGSQVQLVQSGAEVVKPGASVKISCKASGYAFTSYWMNWVRQRPGQGLEWIGQIWPGDGDTNYNGKFKGRVTMTADESTSTAYMELSSLRSEDTAVYYCARRETTTVGRYYYAMDYWGQGTTVTVSSGGGGSEVQLVESGGGLVQPGGSLKLSCAASGFTFNKYAMNWVRQAPGKGLEWVARIRSKYNNYATYYADSVKDRFTISRDDSKNTAYLQMNNLKTEDTAVYYCVRHGNFGNSYISYWAYWGQGTLVTVSSGGGGSGGGGSGGGGSQTVVTQEPSLTVSPGGTVTLTCGSSTGAVTSGNYPNWVQQKPGQAPRGLIGGTKFLAPGTPARFSGSLLGGKAALTLSGVQPEDEAEYYCVLWYSNRWVFGGGTKLTVL

SEQ ID NO: 1353 - DNA, 1512 bp, synthetic construct
  misc_feature 1..1512: note = hCD19 5-G3 LH x I2C HL
  source 1..1512: mol_type = other DNA
gacatccagatgacccagtctccatcttctttgtctgcgtctgtaggggacagagtcaccatcacctgcaaggccagccaaagtgttgattatgatggtctcagttatttgaactggtaccaacagaaaccaggacaggcacccaaactcctcatctatgatgcatccaatctagtttctgggatcccatccaggtttagtggcagtgggtctgggacagacttcaccctcaccatcagttctctggagccggaggatttcgcaacctattactgtcagcaaagtactgaggatccgtggacgttcggtcaagggaccaaggtggagatcaaaggtggtggtggttctggcggcggcggctccggtggtggtggttctcaggtgcagctggtccagtctggggctgaggtggtgaagcctggggcctcagtgaagatttcctgcaaggcttctggctatgcattcactagctactggatgaactgggtgaggcagcgccctggacagggtcttgagtggattggacagatttggcctggagatggtgatactaactacaatggaaagttcaagggtagagtcactatgactgctgacgaatccaccagcacagcctacatggaactcagcagcctgcgatctgaggacactgcggtctattactgtgcaagacgggagactacgacggtaggccgttattactatgctatggactactggggccaagggaccacggtcaccgtctcctccggaggtggtggatccgaggtgcagctggtcgagtctggaggaggattggtgcagcctggagggtcattgaaactctcatgtgcagcctctggattcaccttcaataagtacgccatgaactgggtccgccaggctccaggaaagggtttggaatgggttgctcgcataagaagtaaatataataattatgcaacatattatgccgattcagtgaaagacaggttcaccatctccagagatgattcaaaaaacactgcctatctacaaatgaacaacttgaaaactgaggacactgccgtgtactactgtgtgagacatgggaacttcggtaatagctacatatcctactgggcttactggggccaagggactctggtcaccgtctcctcaggtggtggtggttctggcggcggcggctccggtggtggtggttctcagactgttgtgactcaggaaccttcactcaccgtatcacctggtggaacagtcacactcacttgtggctcctcgactggggctgttacatctggcaactacccaaactgggtccaacaaaaaccaggtcaggcaccccgtggtctaataggtgggactaagttcctcgcccccggtactcctgccagattctcaggctccctgcttggaggcaaggctgccctcaccctctcaggggtacagccagaggatgaggcagaatattactgtgttctatggtacagcaaccgctgggtgttcggtggaggaaccaaactgactgtccta

SEQ ID NO: 1354 - protein, 124 aa, synthetic construct; identical to SEQ ID NO: 1298
  REGION 1..124: note = hCD19 4-E10-H

SEQ ID NO: 1355 - protein, 5 aa, synthetic construct
  REGION 1..5: note = hCD19 4-E10-HCDR1
SYWMN

SEQ ID NO: 1356 - protein, 17 aa, synthetic construct
  REGION 1..17: note = hCD19 4-E10-HCDR2
QIWPGDGDTNYNGKFKG

SEQ ID NO: 1357 - protein, 15 aa, synthetic construct
  REGION 1..15: note = hCD19 4-E10-HCDR3
RETTTVGRYYYAMDY

SEQ ID NO: 1358 - DNA, 372 bp, synthetic construct; identical to SEQ ID NO: 1302
  misc_feature 1..372: note = hCD19 4-E10-H
  source 1..372: mol_type = other DNA

SEQ ID NO: 1359 - protein, 111 aa, synthetic construct
  REGION 1..111: note = hCD19 4-E10-L
DIQMTQSPSSLSASVGDRVTITCKASQSVDYDGTSYLNWYQQKPGQAPKLLIYDASNLVSGVPSRFSGSGSGTDFTLNISSVQPEDVATYYCQQSTEDPWTFGQGTKVEIK

SEQ ID NO: 1360 - protein, 16 aa, synthetic construct
  REGION 1..16: note = hCD19 4-E10-LCDR1
RSSKSLLHSNGNTYLY

SEQ ID NO: 1361 - protein, 7 aa, synthetic construct
  REGION 1..7: note = hCD19 4-E10-LCDR2
RMSNLAS

SEQ ID NO: 1362 - protein, 9 aa, synthetic construct
  REGION 1..9: note = hCD19 4-E10-LCDR3
LQHLEYPYT

SEQ ID NO: 1363 - DNA, 333 bp, synthetic construct
  misc_feature 1..333: note = hCD19 4-E10-L
  source 1..333: mol_type = other DNA
gacatccagatgacccagtctccatcttctttgtctgcgtctgtaggggacagagtcaccatcacctgcaaggccagccaaagtgttgattatgatggtacgagttatttgaactggtaccaacagaaaccaggacaggcacccaaactcctcatctatgatgcatccaatctagtttctggggtcccatccaggtttagtggcagtgggtctgggacagacttcaccctcaacatcagttctgtgcagccggaggatgtcgcaacctattactgtcagcaaagtactgaggatccgtggacgttcggtcaagggaccaaggtggagatcaaa

SEQ ID NO: 1364 - protein, 250 aa, synthetic construct
  REGION 1..250: note = hCD19 4-E10-LH
DIQMTQSPSSLSASVGDRVTITCKASQSVDYDGTSYLNWYQQKPGQAPKLLIYDASNLVSGVPSRFSGSGSGTDFTLNISSVQPEDVATYYCQQSTEDPWTFGQGTKVEIKGGGGSGGGGSGGGGSQVQLVQSGAEVVKPGASVKISCKASGYAFTSYWMNWVRQRPGQGLEWIGQIWPGDGDTNYNGKFKGRVTMTADESTSTAYMELSSLRSEDTAVYYCARRETTTVGRYYYAMDYWGQGTTVTVSS

SEQ ID NO: 1365 - DNA, 750 bp, synthetic construct
  misc_feature 1..750: note = hCD19 4-E10-LH
  source 1..750: mol_type = other DNA
gacatccagatgacccagtctccatcttctttgtctgcgtctgtaggggacagagtcaccatcacctgcaaggccagccaaagtgttgattatgatggtacgagttatttgaactggtaccaacagaaaccaggacaggcacccaaactcctcatctatgatgcatccaatctagtttctggggtcccatccaggtttagtggcagtgggtctgggacagacttcaccctcaacatcagttctgtgcagccggaggatgtcgcaacctattactgtcagcaaagtactgaggatccgtggacgttcggtcaagggaccaaggtggagatcaaaggtggtggtggttctggcggcggcggctccggtggtggtggttctcaggtgcagctggtccagtctggggctgaggtggtgaagcctggggcctcagtgaagatttcctgcaaggcttctggctatgcattcactagctactggatgaactgggtgaggcagcgccctggacagggtcttgagtggattggacagatttggcctggagatggtgatactaactacaatggaaagttcaagggtagagtcactatgactgctgacgaatccaccagcacagcctacatggaactcagcagcctgcgatctgaggacactgcggtctattactgtgcaagacgggagactacgacggtaggccgttattactatgctatggactactggggccaagggaccacggtcaccgtctcctca

SEQ ID NO: 1366 - protein, 504 aa, synthetic construct
  REGION 1..504: note = hCD19 4-E10 LH x I2C HL
DIQMTQSPSSLSASVGDRVTITCKASQSVDYDGTSYLNWYQQKPGQAPKLLIYDASNLVSGVPSRFSGSGSGTDFTLNISSVQPEDVATYYCQQSTEDPWTFGQGTKVEIKGGGGSGGGGSGGGGSQVQLVQSGAEVVKPGASVKISCKASGYAFTSYWMNWVRQRPGQGLEWIGQIWPGDGDTNYNGKFKGRVTMTADESTSTAYMELSSLRSEDTAVYYCARRETTTVGRYYYAMDYWGQGTTVTVSSGGGGSEVQLVESGGGLVQPGGSLKLSCAASGFTFNKYAMNWVRQAPGKGLEWVARIRSKYNNYATYYADSVKDRFTISRDDSKNTAYLQMNNLKTEDTAVYYCVRHGNFGNSYISYWAYWGQGTLVTVSSGGGGSGGGGSGGGGSQTVVTQEPSLTVSPGGTVTLTCGSSTGAVTSGNYPNWVQQKPGQAPRGLIGGTKFLAPGTPARFSGSLLGGKAALTLSGVQPEDEAEYYCVLWYSNRWVFGGGTKLTVL

SEQ ID NO: 1367 - DNA, 1512 bp, synthetic construct
  misc_feature 1..1512: note = hCD19 4-E10 LH x I2C HL
  source 1..1512: mol_type = other DNA
gacatccagatgacccagtctccatcttctttgtctgcgtctgtaggggacagagtcaccatcacctgcaaggccagccaaagtgttgattatgatggtacgagttatttgaactggtaccaacagaaaccaggacaggcacccaaactcctcatctatgatgcatccaatctagtttctggggtcccatccaggtttagtggcagtgggtctgggacagacttcaccctcaacatcagttctgtgcagccggaggatgtcgcaacctattactgtcagcaaagtactgaggatccgtggacgttcggtcaagggaccaaggtggagatcaaaggtggtggtggttctggcggcggcggctccggtggtggtggttctcaggtgcagctggtccagtctggggctgaggtggtgaagcctggggcctcagtgaagatttcctgcaaggcttctggctatgcattcactagctactggatgaactgggtgaggcagcgccctggacagggtcttgagtggattggacagatttggcctggagatggtgatactaactacaatggaaagttcaagggtagagtcactatgactgctgacgaatccaccagcacagcctacatggaactcagcagcctgcgatctgaggacactgcggtctattactgtgcaagacgggagactacgacggtaggccgttattactatgctatggactactggggccaagggaccacggtcaccgtctcctccggaggtggtggatccgaggtgcagctggtcgagtctggaggaggattggtgcagcctggagggtcattgaaactctcatgtgcagcctctggattcaccttcaataagtacgccatgaactgggtccgccaggctccaggaaagggtttggaatgggttgctcgcataagaagtaaatataataattatgcaacatattatgccgattcagtgaaagacaggttcaccatctccagagatgattcaaaaaacactgcctatctacaaatgaacaacttgaaaactgaggacactgccgtgtactactgtgtgagacatgggaacttcggtaatagctacatatcctactgggcttactggggccaagggactctggtcaccgtctcctcaggtggtggtggttctggcggcggcggctccggtggtggtggttctcagactgttgtgactcaggaaccttcactcaccgtatcacctggtggaacagtcacactcacttgtggctcctcgactggggctgttacatctggcaactacccaaactgggtccaacaaaaaccaggtcaggcaccccgtggtctaataggtgggactaagttcctcgcccccggtactcctgccagattctcaggctccctgcttggaggcaaggctgccctcaccctctcaggggtacagccagaggatgaggcagaatattactgtgttctatggtacagcaaccgctgggtgttcggtggaggaaccaaactgactgtccta

SEQ ID NO: 1368 - protein, 124 aa, synthetic construct; identical to SEQ ID NO: 1298
  REGION 1..124: note = hCD19 4-E3-H

SEQ ID NO: 1369 - protein, 5 aa, synthetic construct
  REGION 1..5: note = hCD19 4-E3-HCDR1
SYWMN

SEQ ID NO: 1370 - protein, 17 aa, synthetic construct
  REGION 1..17: note = hCD19 4-E3-HCDR2
QIWPGDGDTNYNGKFKG

SEQ ID NO: 1371 - protein, 15 aa, synthetic construct
  REGION 1..15: note = hCD19 4-E3-HCDR3
RETTTVGRYYYAMDY

SEQ ID NO: 1372 - DNA, 372 bp, synthetic construct; identical to SEQ ID NO: 1302
  misc_feature 1..372: note = hCD19 4-E3-H
  source 1..372: mol_type = other DNA

SEQ ID NO: 1373 - protein, 111 aa, synthetic construct
  REGION 1..111: note = hCD19 4-E3-L
DIQMTQSPSSLAASVGERVTITCKASQSVDYDGTSYLNWYQQKPGKAPKLLIYDASNLVSGVPSRFSGSGSGTDFTLTINSLEKEDFATYYCQQSTEDPWTFGQGTKVEIK

SEQ ID NO: 1374 - protein, 16 aa, synthetic construct
  REGION 1..16: note = hCD19 4-E3-LCDR1
RSSKSLLHSNGNTYLY

SEQ ID NO: 1375 - protein, 7 aa, synthetic construct
  REGION 1..7: note = hCD19 4-E3-LCDR2
RMSNLAS

SEQ ID NO: 1376 - protein, 9 aa, synthetic construct
  REGION 1..9: note = hCD19 4-E3-LCDR3
LQHLEYPYT

SEQ ID NO: 1377 - DNA, 333 bp, synthetic construct
  misc_feature 1..333: note = hCD19 4-E3-L
  source 1..333: mol_type = other DNA
gacatccagatgacccagtctccatcttctttggctgcgtctgtaggggagagagtcaccatcacctgcaaggccagccaaagtgttgattatgatggtacgagttatttgaactggtaccaacagaaaccaggaaaggcacccaaactcctcatctatgatgcatccaatctagtttctggggtcccatccaggtttagtggcagtgggtctgggacagacttcaccctcaccatcaattctctggagaaggaggatttcgcaacctattactgtcagcaaagtactgaggatccgtggacgttcggtcaagggaccaaggtggagatcaaa

SEQ ID NO: 1378 - protein, 250 aa, synthetic construct
  REGION 1..250: note = hCD19 4-E3-LH
DIQMTQSPSSLAASVGERVTITCKASQSVDYDGTSYLNWYQQKPGKAPKLLIYDASNLVSGVPSRFSGSGSGTDFTLTINSLEKEDFATYYCQQSTEDPWTFGQGTKVEIKGGGGSGGGGSGGGGSQVQLVQSGAEVVKPGASVKISCKASGYAFTSYWMNWVRQRPGQGLEWIGQIWPGDGDTNYNGKFKGRVTMTADESTSTAYMELSSLRSEDTAVYYCARRETTTVGRYYYAMDYWGQGTTVTVSS

SEQ ID NO: 1379 - DNA, 750 bp, synthetic construct
  misc_feature 1..750: note = hCD19 4-E3-LH
  source 1..750: mol_type = other DNA
gacatccagatgacccagtctccatcttctttggctgcgtctgtaggggagagagtcaccatcacctgcaaggccagccaaagtgttgattatgatggtacgagttatttgaactggtaccaacagaaaccaggaaaggcacccaaactcctcatctatgatgcatccaatctagtttctggggtcccatccaggtttagtggcagtgggtctgggacagacttcaccctcaccatcaattctctggagaaggaggatttcgcaacctattactgtcagcaaagtactgaggatccgtggacgttcggtcaagggaccaaggtggagatcaaaggtggtggtggttctggcggcggcggctccggtggtggtggttctcaggtgcagctggtccagtctggggctgaggtggtgaagcctggggcctcagtgaagatttcctgcaaggcttctggctatgcattcactagctactggatgaactgggtgaggcagcgccctggacagggtcttgagtggattggacagatttggcctggagatggtgatactaactacaatggaaagttcaagggtagagtcactatgactgctgacgaatccaccagcacagcctacatggaactcagcagcctgcgatctgaggacactgcggtctattactgtgcaagacgggagactacgacggtaggccgttattactatgctatggactactggggccaagggaccacggtcaccgtctcctca

SEQ ID NO: 1380 - protein, 504 aa, synthetic construct
  REGION 1..504: note = hCD19 4-E3 LH X I2C HL
DIQMTQSPSSLAASVGERVTITCKASQSVDYDGTSYLNWYQQKPGKAPKLLIYDASNLVSGVPSRFSGSGSGTDFTLTINSLEKEDFATYYCQQSTEDPWTFGQGTKVEIKGGGGSGGGGSGGGGSQVQLVQSGAEVVKPGASVKISCKASGYAFTSYWMNWVRQRPGQGLEWIGQIWPGDGDTNYNGKFKGRVTMTADESTSTAYMELSSLRSEDTAVYYCARRETTTVGRYYYAMDYWGQGTTVTVSSGGGGSEVQLVESGGGLVQPGGSLKLSCAASGFTFNKYAMNWVRQAPGKGLEWVARIRSKYNNYATYYADSVKDRFTISRDDSKNTAYLQMNNLKTEDTAVYYCVRHGNFGNSYISYWAYWGQGTLVTVSSGGGGSGGGGSGGGGSQTVVTQEPSLTVSPGGTVTLTCGSSTGAVTSGNYPNWVQQKPGQAPRGLIGGTKFLAPGTPARFSGSLLGGKAALTLSGVQPEDEAEYYCVLWYSNRWVFGGGTKLTVL

SEQ ID NO: 1381 - DNA, 1512 bp, synthetic construct
  misc_feature 1..1512: note = hCD19 4-E3 LH X I2C HL
  source 1..1512: mol_type = other DNA
gacatccagatgacccagtctccatcttctttggctgcgtctgtaggggagagagtcaccatcacctgcaaggccagccaaagtgttgattatgatggtacgagttatttgaactggtaccaacagaaaccaggaaaggcacccaaactcctcatctatgatgcatccaatctagtttctggggtcccatccaggtttagtggcagtgggtctgggacagacttcaccctcaccatcaattctctggagaaggaggatttcgcaacctattactgtcagcaaagtactgaggatccgtggacgttcggtcaagggaccaaggtggagatcaaaggtggtggtggttctggcggcggcggctccggtggtggtggttctcaggtgcagctggtccagtctggggctgaggtggtgaagcctggggcctcagtgaagatttcctgcaaggcttctggctatgcattcactagctactggatgaactgggtgaggcagcgccctggacagggtcttgagtggattggacagatttggcctggagatggtgatactaactacaatggaaagttcaagggtagagtcactatgactgctgacgaatccaccagcacagcctacatggaactcagcagcctgcgatctgaggacactgcggtctattactgtgcaagacgggagactacgacggtaggccgttattactatgctatggactactggggccaagggaccacggtcaccgtctcctccggaggtggtggatccgaggtgcagctggtcgagtctggaggaggattggtgcagcctggagggtcattgaaactctcatgtgcagcctctggattcaccttcaataagtacgccatgaactgggtccgccaggctccaggaaagggtttggaatgggttgctcgcataagaagtaaatataataattatgcaacatattatgccgattcagtgaaagacaggttcaccatctccagagatgattcaaaaaacactgcctatctacaaatgaacaacttgaaaactgaggacactgccgtgtactactgtgtgagacatgggaacttcggtaatagctacatatcctactgggcttactggggccaagggactctggtcaccgtctcctcaggtggtggtggttctggcggcggcggctccggtggtggtggttctcagactgttgtgactcaggaaccttcactcaccgtatcacctggtggaacagtcacactcacttgtggctcctcgactggggctgttacatctggcaactacccaaactgggtccaacaaaaaccaggtcaggcaccccgtggtctaataggtgggactaagttcctcgcccccggtactcctgccagattctcaggctccctgcttggaggcaaggctgccctcaccctctcaggggtacagccagaggatgaggcagaatattactgtgttctatggtacagcaaccgctgggtgttcggtggaggaaccaaactgactgtccta

SEQ ID NO: 1382 - protein, 124 aa, synthetic construct; identical to SEQ ID NO: 1298
  REGION 1..124: note = hCD19 3-H7 -H

SEQ ID NO: 1383 - protein, 5 aa, synthetic construct
  REGION 1..5: note = hCD19 3-H7 -HCDR1
SYWMN

SEQ ID NO: 1384 - protein, 17 aa, synthetic construct
  REGION 1..17: note = hCD19 3-H7 -HCDR2
QIWPGDGDTNYNGKFKG

SEQ ID NO: 1385 - protein, 15 aa, synthetic construct
  REGION 1..15: note = hCD19 3-H7 -HCDR3
RETTTVGRYYYAMDY

SEQ ID NO: 1386 - DNA, 372 bp, synthetic construct; identical to SEQ ID NO: 1302
  misc_feature 1..372: note = hCD19 3-H7 -H
  source 1..372: mol_type = other DNA

SEQ ID NO: 1387 - protein, 111 aa, synthetic construct
  REGION 1..111: note = hCD19 3-H7 -L
DIQMTQSPSSLSASVGDRVTITCKASQSVDYDGTSYLNWYQQKPGKAPKLLIYDASNLVSGVPSRFSGSGSGTDFTLNISSLQPEDVATYYCQQSTEDPWTFGQGTKVEIK

SEQ ID NO: 1388 - protein, 16 aa, synthetic construct
  REGION 1..16: note = hCD19 3-H7 -LCDR1
RSSKSLLHSNGNTYLY

SEQ ID NO: 1389 - protein, 7 aa, synthetic construct
  REGION 1..7: note = hCD19 3-H7 -LCDR2
RMSNLAS

SEQ ID NO: 1390 - protein, 9 aa, synthetic construct
  REGION 1..9: note = hCD19 3-H7 -LCDR3
LQHLEYPYT

SEQ ID NO: 1391 - DNA, 333 bp, synthetic construct
  misc_feature 1..333: note = hCD19 3-H7 -L
  source 1..333: mol_type = other DNA
gacatccagatgacccagtctccatcttctttgtctgcgtctgtaggggacagagtcaccatcacctgcaaggccagccaaagtgttgattatgatggtacgagttatttgaactggtaccaacagaaaccaggaaaggcacccaaactcctcatctatgatgcatccaatctagtttctggggtcccatccaggtttagtggcagtgggtctgggacagacttcaccctcaacatcagttctctgcagccggaggatgtcgcaacctattactgtcagcaaagtactgaggatccgtggacgttcggtcaagggaccaaggtggagatcaaa

SEQ ID NO: 1392 - protein, 250 aa, synthetic construct
  REGION 1..250: note = hCD19 3-H7 -LH
DIQMTQSPSSLSASVGDRVTITCKASQSVDYDGTSYLNWYQQKPGKAPKLLIYDASNLVSGVPSRFSGSGSGTDFTLNISSLQPEDVATYYCQQSTEDPWTFGQGTKVEIKGGGGSGGGGSGGGGSQVQLVQSGAEVVKPGASVKISCKASGYAFTSYWMNWVRQRPGQGLEWIGQIWPGDGDTNYNGKFKGRVTMTADESTSTAYMELSSLRSEDTAVYYCARRETTTVGRYYYAMDYWGQGTTVTVSS

SEQ ID NO: 1393 - DNA, 750 bp, synthetic construct
  misc_feature 1..750: note = hCD19 3-H7 -LH
  source 1..750: mol_type = other DNA
gacatccagatgacccagtctccatcttctttgtctgcgtctgtaggggacagagtcaccatcacctgcaaggccagccaaagtgttgattatgatggtacgagttatttgaactggtaccaacagaaaccaggaaaggcacccaaactcctcatctatgatgcatccaatctagtttctggggtcccatccaggtttagtggcagtgggtctgggacagacttcaccctcaacatcagttctctgcagccggaggatgtcgcaacctattactgtcagcaaagtactgaggatccgtggacgttcggtcaagggaccaaggtggagatcaaaggtggtggtggttctggcggcggcggctccggtggtggtggttctcaggtgcagctggtccagtctggggctgaggtggtgaagcctggggcctcagtgaagatttcctgcaaggcttctggctatgcattcactagctactggatgaactgggtgaggcagcgccctggacagggtcttgagtggattggacagatttggcctggagatggtgatactaactacaatggaaagttcaagggtagagtcactatgactgctgacgaatccaccagcacagcctacatggaactcagcagcctgcgatctgaggacactgcggtctattactgtgcaagacgggagactacgacggtaggccgttattactatgctatggactactggggccaagggaccacggtcaccgtctcctca

SEQ ID NO: 1394 - protein, 504 aa, synthetic construct
  REGION 1..504: note = hCD19 3-H7 LH X I2C HL
DIQMTQSPSSLSASVGDRVTITCKASQSVDYDGTSYLNWYQQKPGKAPKLLIYDASNLVSGVPSRFSGSGSGTDFTLNISSLQPEDVATYYCQQSTEDPWTFGQGTKVEIKGGGGSGGGGSGGGGSQVQLVQSGAEVVKPGASVKISCKASGYAFTSYWMNWVRQRPGQGLEWIGQIWPGDGDTNYNGKFKGRVTMTADESTSTAYMELSSLRSEDTAVYYCARRETTTVGRYYYAMDYWGQGTTVTVSSGGGGSEVQLVESGGGLVQPGGSLKLSCAASGFTFNKYAMNWVRQAPGKGLEWVARIRSKYNNYATYYADSVKDRFTISRDDSKNTAYLQMNNLKTEDTAVYYCVRHGNFGNSYISYWAYWGQGTLVTVSSGGGGSGGGGSGGGGSQTVVTQEPSLTVSPGGTVTLTCGSSTGAVTSGNYPNWVQQKPGQAPRGLIGGTKFLAPGTPARFSGSLLGGKAALTLSGVQPEDEAEYYCVLWYSNRWVFGGGTKLTVL

SEQ ID NO: 1395 - DNA, 1512 bp, synthetic construct
  misc_feature 1..1512: note = hCD19 3-H7 LH X I2C HL
  source 1..1512: mol_type = other DNA
gacatccagatgacccagtctccatcttctttgtctgcgtctgtaggggacagagtcaccatcacctgcaaggccagccaaagtgttgattatgatggtacgagttatttgaactggtaccaacagaaaccaggaaaggcacccaaactcctcatctatgatgcatccaatctagtttctggggtcccatccaggtttagtggcagtgggtctgggacagacttcaccctcaacatcagttctctgcagccggaggatgtcgcaacctattactgtcagcaaagtactgaggatccgtggacgttcggtcaagggaccaaggtggagatcaaaggtggtggtggttctggcggcggcggctccggtggtggtggttctcaggtgcagctggtccagtctggggctgaggtggtgaagcctggggcctcagtgaagatttcctgcaaggcttctggctatgcattcactagctactggatgaactgggtgaggcagcgccctggacagggtcttgagtggattggacagatttggcctggagatggtgatactaactacaatggaaagttcaagggtagagtcactatgactgctgacgaatccaccagcacagcctacatggaactcagcagcctgcgatctgaggacactgcggtctattactgtgcaagacgggagactacgacggtaggccgttattactatgctatggactactggggccaagggaccacggtcaccgtctcctccggaggtggtggatccgaggtgcagctggtcgagtctggaggaggattggtgcagcctggagggtcattgaaactctcatgtgcagcctctggattcaccttcaataagtacgccatgaactgggtccgccaggctccaggaaagggtttggaatgggttgctcgcataagaagtaaatataataattatgcaacatattatgccgattcagtgaaagacaggttcaccatctccagagatgattcaaaaaacactgcctatctacaaatgaacaacttgaaaactgaggacactgccgtgtactactgtgtgagacatgggaacttcggtaatagctacatatcctactgggcttactggggccaagggactctggtcaccgtctcctcaggtggtggtggttctggcggcggcggctccggtggtggtggttctcagactgttgtgactcaggaaccttcactcaccgtatcacctggtggaacagtcacactcacttgtggctcctcgactggggctgttacatctggcaactacccaaactgggtccaacaaaaaccaggtcaggcaccccgtggtctaataggtgggactaagttcctcgcccccggtactcctgccagattctcaggctccctgcttggaggcaaggctgccctcaccctctcaggggtacagccagaggatgaggcagaatattactgtgttctatggtacagcaaccgctgggtgttcggtggaggaaccaaactgactgtccta

SEQ ID NO: 1396 - DNA, 2952 bp, synthetic construct
  misc_feature 1..2952: note = cMET-1
  source 1..2952: mol_type = other DNA
atgggatggagctgtatcatcctcttcttggtagcaacagctacaggtgtacactccgagtgtaaagaggcactagcaaagtccgagatgaatgtgaatatgaagtatcagcttcccaacttcaccgcggaaacacccatccagaatgtcattctacatgagcatcacattttccttggtgccactaactacatttatgttttaaatgaggaagaccttcagaaggttgctgagtacaagactgggcctgtgctggaacacccagattgtttcccatgtcaggactgcagcagcaaagccaatttatcaggaggtgtttggaaagataacatcaacatggctctagttgtggacacctactatgatgatcaactcattagctgtggcagcgtcaacagagggacctgccagcgacatgtctttccccacaatcatactgctgacatacagtcggaggttcactgcatattctccccacagatagaagagcccagccagtgtcctgactgtgtggtgagcgccctgggagccaaagtcctttcatctgtaaaggaccggttcatcaacttctttgtaggcaataccataaattcttcttatttcccagatcatccattgcattcgatatcagtgagaaggctaaaggaaacgaaagatggttttatgtttttgacggaccagtcctacattgatgttttacctgagttcagagattcttaccccattaagtatgtccatgcctttgaaagcaacaattttatttacttcttgacggtccaaagggaaactctagatgctcagacttttcacacaagaataatcaggttctgttccataaactctggattgcattcctacatggaaatgcctctggagtgtattctcacagaaaagagaaaaaagagatccacaaagaaggaagtgtttaatatacttcaggctgcgtatgtcagcaagcctggggcccagcttgctagacaaataggagccagcctgaatgatgacattcttttcggggtgttcgcacaaagcaagccagattctgccgaaccaatggatcgatctgccatgtgtgcattccctatcaaatatgtcaacgacttcttcaacaagatcgtcaacaaaaacaatgtgagatgtctccagcatttttacggacccaatcatgagcactgctttaataggacacttctgagaaattcatcaggctgtgaagcgcgccgtgatgaatatcgaacagagtttaccacagctttgcagcgcgttgacttattcatgggtcaattcagcgaagtcctcttaacatctatatccaccttcattaaaggagacctcaccatagctaatcttgggacatcagagggtcgcttcatgcaggttgtggtttctcgatcaggaccatcaacccctcatgtgaattttctcctggactcccatccagtgtctccagaagtgattgtggagcatacattaaaccaaaatggctacacactggttatcactgggaagaagatcacgaagatcccattgaatggcttgggctgcagacatttccagtcctgcagtcaatgcctctctgccccaccctttgttcagtgtggctggtgccacgacaaatgtgtgcgatcggaggaatgcctgagcgggacatggactcaacagatctgtctgcctgcaatctacaaggttttcccaaatagtgcaccccttgaaggagggacaaggctgaccatatgtggctgggactttggatttcggaggaataataaatttgatttaaagaaaactagagttctccttggaaatgagagctgcaccttgactttaagtgagagcacgatgaatacattgaaatgcacagttggtcctgccatgaataagcatttcaatatgtccataattatttcaaatggccacgggacaacacaatacagtacattctcctatgtggatcctgtaataacaagtatttcgccgaaatacggtcctatggctggtggcactttacttactttaactggaaattacctaaacagtgggaatagcagacacatttcaattggtggaaaaacatgtactttaaaaagtgtgtcaaacagtattcttgaatgttataccccagcccaaaccatttcaactgagtttgctgttaaattgaaaattgacttagccaaccgagagacaagcatcttcagttaccgtgaagatcccattgtctatgaaattcatccaaccaaatcttttattagtggtgggagcacaataacaggtgttgggaaaaacctgaactcagttagtgtcccgagaatggtcataaatgtgcatgaagcaggaaggaactttacagtggcatgtcaacatcgctctaattcagagataatctgttgtaccactccttccctgcaacagctgaatctgcaactccccctgaaaaccaaagcctttttcatgttagatgggatcctttccaaatactttgatctcatttatgtacataatcctgtgtttaagccttttgaaaagccagtgatgatctcaatgggcaatgaaaatgtactggaaattaagggaaatgatattgaccctgaagcagttaaaggtgaagtgttaaaagttggaaataagagctgtgagaatatacacttacattctgaagccgttttatgcacggtccccaatgacctgctgaaattgaacagcgagctaaatatagagtggaagcaagcaatttcttcaaccgtccttggaaaagtaatagttcaaccagatcagaatttcacatccggaggtggtggatccggggctggtgttattgctgttattgtggttgtggtgatagcaattgttgctggaattgttgtgctggttatttccagaaagaagagaatggcaaagtatgagaaggctgagataaaggagatgggtgagatgcatagggaactcaatgcataa

SEQ ID NO: 1397 - protein, 983 aa, synthetic construct
  REGION 1..983: note = cMET-2
MGWSCIILFLVATATGVHSECKEALAKSEMNVNMKYQLPNFTAETPIQNVILHEHHIFLGATNYIYVLNEEDLQKVAEYKTGPVLEHPDCFPCQDCSSKANLSGGVWKDNINMALVVDTYYDDQLISCGSVNRGTCQRHVFPHNHTADIQSEVHCIFSPQIEEPSQCPDCVVSALGAKVLSSVKDRFINFFVGNTINSSYFPDHPLHSISVRRLKETKDGFMFLTDQSYIDVLPEFRDSYPIKYVHAFESNNFIYFLTVQRETLDAQTFHTRIIRFCSINSGLHSYMEMPLECILTEKRKKRSTKKEVFNILQAAYVSKPGAQLARQIGASLNDDILFGVFAQSKPDSAEPMDRSAMCAFPIKYVNDFFNKIVNKNNVRCLQHFYGPNHEHCFNRTLLRNSSGCEARRDEYRTEFTTALQRVDLFMGQFSEVLLTSISTFIKGDLTIANLGTSEGRFMQVVVSRSGPSTPHVNFLLDSHPVSPEVIVEHTLNQNGYTLVITGKKITKIPLNGLGCRHFQSCSQCLSAPPFVQCGWCHDKCVRSEECLSGTWTQQICLPAIYKVFPNSAPLEGGTRLTICGWDFGFRRNNKFDLKKTRVLLGNESCTLTLSESTMNTLKCTVGPAMNKHFNMSIIISNGHGTTQYSTFSYVDPVITSISPKYGPMAGGTLLTLTGNYLNSGNSRHISIGGKTCTLKSVSNSILECYTPAQTISTEFAVKLKIDLANRETSIFSYREDPIVYEIHPTKSFISGGSTITGVGKNLNSVSVPRMVINVHEAGRNFTVACQHRSNSEIICCTTPSLQQLNLQLPLKTKAFFMLDGILSKYFDLIYVHNPVFKPFEKPVMISMGNENVLEIKGNDIDPEAVKGEVLKVGNKSCENIHLHSEAVLCTVPNDLLKLNSELNIEWKQAISSTVLGKVIVQPDQNFTSGGGGSGAGVIAVIVVVVIAIVAGIVVLVISRKKRMAKYEKAEIKEMGEMHRELNA

SEQ ID NO: 1398 - DNA, 2952 bp, synthetic construct
  misc_feature 1..2952: note = cMET-3
  source 1..2952: mol_type = other DNA
atgggatggagctgtatcatcctcttcttggtagcaacagctacaggtgtacactccgagtgtaaagaggcactagcaaagtccgagatgaatgtgaatatgaagtatcagcttcccaacttcaccgcggaaacagccatccagaatgtcattctacatgagcatcacattttcctcggtgccaccaactacatttatgttttaaatgaggaagaccttcagaaggttgctgagtacaagaccgggcctgtgctggaacacccagattgtttcccgtgtcaggactgcagcagcaaagccaatttatcaggaggcgtttggaaagataacatcaacatggctctggttgtggacacctactatgatgatcaactcattagctgtggcagcgtcaacagagggacctgccagcgacatgtctttccccataatcatactgctgacatacagtcggaggttcactgcatattctccccacagatagaagagcccaaccagtgccctgactgtgtggtgagcgccctgggagccaaagtcctttcatctgtaaaggaccggttcatcaacttctttgtaggcaataccataaattcttcttatttcccacatcatccgttgcattcgatatcagtgagaaggctaaaggaaacgaaagatggttttatgtttttgacagaccagtcctacattgatgttttacctgagttcagagattcttaccccattaagtacatccacgcttttgaaagcaacaattttatttacttcttgacggtccaaagggaaactctaaatgctcagacttttcacacaagaataatcaggttctgttccttaaactctggattgcactcctacatggaaatgcctctagagtgtattctcacagaaaagagaaaaaagagatccacaaagaaggaagtgtttaatatccttcaggctgcatatgtcagcaagcccggggcccagcttgctagacaaataggagccagcctgaatgatgacattctctttggggtgttcgcacaaagcaagccagattctgccgaaccaatggatcgatctgcaatgtgtgcatttcctatcaaatatgtcaacgacttcttcaacaagatcgtcaacaaaaacaatgtgagatgtctccagcatttttatggacccaatcatgagcactgttttaataggacacttctgagaaattcatcaggctgtgaagcgcgccgtgatgaatatcgagcagagtttaccacagctttgcagcgggttgacttattcatgggtcaattcagcgaagtcctcttaacatctatatccaccttcgtgaaaggagacctcaccatcgctaatcttgggacatcagagggtcgcttcatgcaggttgtggtttctcgatcaggaccatcaacccctcatgtgaattttctcctggactctcacccggtgtctccagaagtgattgtggagcatccattaaaccagaatggctacacactggttgtcacggggaagaagatcaccaagatcccattgaatggcttgggctgcagacatttccagtcctgcagtcagtgcctctctgccccaccctttgtgcagtgtggctggtgccacgacaaatgtgtgcgatcggaggaatgccccagtgggacatggactcaacagatctgtctgcctgcaatctacaaggttttcccaactagtgcaccccttgaaggagggacaaggctgaccatatgtggctgggactttggatttcggaggaataataaatttgatttaaagaaaactagagttctccttggaaatgagagctgcaccttgactttaagtgagagcacgatgaatacattgaaatgcacagttggtcctgccatgaataaacatttcaatatgtccataattatttcaaatggccacgggacaacacaatacagtacattttcctatgtggatcctataataacaagtatttcgccaaaatatggccctatggctggtggcactttacttactttaactggaaattacctaaacagtggcaattctagacacatttcaattggtggaaaaacatgtactttaaaaagtgtgtcaaacagtattctcgaatgttataccccagcccaaaccatttcaactgagtttgctgttaaattgaaaattgacttagccaaccgagagacaagcatcttcagttaccgggaagaccccattgtctatgaaattcatccaaccaaatcttttattagtggtgggagcacaataacaggtgttgggaaaaacctgcattcagttagtgtcccgaggatggtcataaatgtgcatgaagcaggaaggaactttacagtggcatgtcagcatcgctctaattcagagataatctgctgtaccactccttccctgcaacagctgaatctgcaactccccctgaaaaccaaagcctttttcatgttagatgggatcctttccaaatactttgatctcatttatgtacataatcctgtgtttaagccttttgaaaagccagtaatgatctcaatgggcaatgaaaatgtactggaaattaagggaaatgatattgaccctgaagcagttaaaggtgaagtgttaaaagttggaaataagagctgtgagaatatacacttacattctgaagccgttttatgcacggtccccaatgacctgctgaaattgaacagcgagctaaatatagagtggaagcaagcaatttcttcaaccgtccttggaaaagtaatagttcaaccagatcagaatttcacctccggaggtggtggatccggggctggtgttattgctgttattgtggttgtggtgatagcaattgttgctggaattgttgtgctggttatttccagaaagaagagaatggcaaagtatgagaaggctgagataaaggagatgggtgagatgcatagggaactcaatgcataa

SEQ ID NO: 1399 - protein, 983 aa, synthetic construct
  REGION 1..983: note = cMET-4
MGWSCIILFLVATATGVHSECKEALAKSEMNVNMKYQLPNFTAETAIQNVILHEHHIFLGATNYIYVLNEEDLQKVAEYKTGPVLEHPDCFPCQDCSSKANLSGGVWKDNINMALVVDTYYDDQLISCGSVNRGTCQRHVFPHNHTADIQSEVHCIFSPQIEEPNQCPDCVVSALGAKVLSSVKDRFINFFVGNTINSSYFPHHPLHSISVRRLKETKDGFMFLTDQSYIDVLPEFRDSYPIKYIHAFESNNFIYFLTVQRETLNAQTFHTRIIRFCSLNSGLHSYMEMPLECILTEKRKKRSTKKEVFNILQAAYVSKPGAQLARQIGASLNDDILFGVFAQSKPDSAEPMDRSAMCAFPIKYVNDFFNKIVNKNNVRCLQHFYGPNHEHCFNRTLLRNSSGCEARRDEYRAEFTTALQRVDLFMGQFSEVLLTSISTFVKGDLTIANLGTSEGRFMQVVVSRSGPSTPHVNFLLDSHPVSPEVIVEHPLNQNGYTLVVTGKKITKIPLNGLGCRHFQSCSQCLSAPPFVQCGWCHDKCVRSEECPSGTWTQQICLPAIYKVFPTSAPLEGGTRLTICGWDFGFRRNNKFDLKKTRVLLGNESCTLTLSESTMNTLKCTVGPAMNKHFNMSIIISNGHGTTQYSTFSYVDPIITSISPKYGPMAGGTLLTLTGNYLNSGNSRHISIGGKTCTLKSVSNSILECYTPAQTISTEFAVKLKIDLANRETSIFSYREDPIVYEIHPTKSFISGGSTITGVGKNLHSVSVPRMVINVHEAGRNFTVACQHRSNSEIICCTTPSLQQLNLQLPLKTKAFFMLDGILSKYFDLIYVHNPVFKPFEKPVMISMGNENVLEIKGNDIDPEAVKGEVLKVGNKSCENIHLHSEAVLCTVPNDLLKLNSELNIEWKQAISSTVLGKVIVQPDQNFTSGGGGSGAGVIAVIVVVVIAIVAGIVVLVISRKKRMAKYEKAEIKEMGEMHRELNA

SEQ ID NO: 1400 - protein, 119 aa, synthetic construct
  REGION 1..119: note = ME86H11-H
QVQLVQSGAEVKRPGASVKVSCRASGYTFTSYWLHWVRQGPGQRLEWIGMIDPSNSDTRFNPNFKDRATFTVDTSASTAYMELSSLTSEDTAVYYCATYGSYVSPLDYWGQGTSVTVSS

SEQ ID NO: 1401 - protein, 5 aa, synthetic construct
  REGION 1..5: note = ME86H11-HCDR1
SYWLH

SEQ ID NO: 1402 - protein, 17 aa, synthetic construct
  REGION 1..17: note = ME86H11-HCDR2
MIDPSNSDTRFNPNFKD

SEQ ID NO: 1403 - protein, 10 aa, synthetic construct
  REGION 1..10: note = ME86H11-HCDR3
YGSYVSPLDY

SEQ ID NO: 1404 - DNA, 357 bp, synthetic construct
  misc_feature 1..357: note = ME86H11-H
  source 1..357: mol_type = other DNA
caggtgcagctggtccagtctggggctgaagtgaagaggcctggggcttcagtgaaagtgtcctgcagggcttcgggctataccttcaccagctactggttgcactgggttagacaggggcctggacaaaggcttgagtggataggcatgattgatccttccaatagtgacactaggtttaatccgaacttcaaggacagggccacattcactgtagacacatctgccagcacagcctacatggagctcagcagcctgacatctgaggacactgcagtctattactgtgccacatatggtagctacgtttcccctctggactactggggtcaaggaacctcggtcaccgtctcctca

SEQ ID NO: 1405 - protein, 113 aa, synthetic construct
  REGION 1..113: note = ME86H11-L
DIVMTQTPFSLPVTLGETVSISCKSSQSLLYTSSQKNYLAWYLQKPGQSPQLLIYWASTRESGVPDRFSGSGSGTDFTLKISRVEAEDVGVYYCQQYYAYPWTFGGGTKLEIK

SEQ ID NO: 1406 - protein, 17 aa, synthetic construct
  REGION 1..17: note = ME86H11-LCDR1
KSSQSLLYTSSQKNYLA

SEQ ID NO: 1407 - protein, 7 aa, synthetic construct
  REGION 1..7: note = ME86H11-LCDR2
WASTRES

SEQ ID NO: 1408 - protein, 9 aa, synthetic construct
  REGION 1..9: note = ME86H11-LCDR3
QQYYAYPWT

SEQ ID NO: 1409 - DNA, 339 bp, synthetic construct
  misc_feature 1..339: note = ME86H11-L
  source 1..339: mol_type = other DNA
gacatcgtgatgacccagactccattctccctacctgtgacacttggagagacggtttctatcagctgcaagtccagtcagtcccttttatatactagcagtcagaagaactacttggcctggtacctgcagaaaccaggtcagtctcctcaactgctgatttactgggcatccactagggaatctggggtccctgatcgcttctcaggcagtggatctgggacagatttcactctcaaaatctccagagtggaggctgaggacgtgggagtttattactgtcagcaatattatgcctatccgtggacgttcggtggaggcacaaagttggagatcaaa

SEQ ID NO: 1410 - protein, 247 aa, synthetic construct
  REGION 1..247: note = ME86H11-HL
QVQLVQSGAEVKRPGASVKVSCRASGYTFTSYWLHWVRQGPGQRLEWIGMIDPSNSDTRFNPNFKDRATFTVDTSASTAYMELSSLTSEDTAVYYCATYGSYVSPLDYWGQGTSVTVSSGGGGSGGGGSGGGGSDIVMTQTPFSLPVTLGETVSISCKSSQSLLYTSSQKNYLAWYLQKPGQSPQLLIYWASTRESGVPDRFSGSGSGTDFTLKISRVEAEDVGVYYCQQYYAYPWTFGGGTKLEIK

SEQ ID NO: 1411 - DNA, 741 bp, synthetic construct
  misc_feature 1..741: note = ME86H11-HL
  source 1..741: mol_type = other DNA
caggtgcagctggtccagtctggggctgaagtgaagaggcctggggcttcagtgaaagtgtcctgcagggcttcgggctataccttcaccagctactggttgcactgggttagacaggggcctggacaaaggcttgagtggataggcatgattgatccttccaatagtgacactaggtttaatccgaacttcaaggacagggccacattcactgtagacacatctgccagcacagcctacatggagctcagcagcctgacatctgaggacactgcagtctattactgtgccacatatggtagctacgtttcccctctggactactggggtcaaggaacctcggtcaccgtctcctcaggtggtggtggttctggcggcggcggctccggtggtggtggttctgacatcgtgatgacccagactccattctccctacctgtgacacttggagagacggtttctatcagctgcaagtccagtcagtcccttttatatactagcagtcagaagaactacttggcctggtacctgcagaaaccaggtcagtctcctcaactgctgatttactgggcatccactagggaatctggggtccctgatcgcttctcaggcagtggatctgggacagatttcactctcaaaatctccagagtggaggctgaggacgtgggagtttattactgtcagcaatattatgcctatccgtggacgttcggtggaggcacaaagttggagatcaaa

SEQ ID NO: 1412 - protein, 502 aa, synthetic construct
  REGION 1..502: note = ME86H11 HL x I2C HL
QVQLVQSGAEVKRPGASVKVSCRASGYTFTSYWLHWVRQGPGQRLEWIGMIDPSNSDTRFNPNFKDRATFTVDTSASTAYMELSSLTSEDTAVYYCATYGSYVSPLDYWGQGTSVTVSSGGGGSGGGGSGGGGSDIVMTQTPFSLPVTLGETVSISCKSSQSLLYTSSQKNYLAWYLQKPGQSPQLLIYWASTRESGVPDRFSGSGSGTDFTLKISRVEAEDVGVYYCQQYYAYPWTFGGGTKLEIKSGGGGSEVQLVESGGGLVQPGGSLKLSCAASGFTFNKYAMNWVRQAPGKGLEWVARIRSKYNNYATYYADSVKDRFTISRDDSKNTAYLQMNNLKTEDTAVYYCVRHGNFGNSYISYWAYWGQGTLVTVSSGGGGSGGGGSGGGGSQTVVTQEPSLTVSPGGTVTLTCGSSTGAVTSGNYPNWVQQKPGQAPRGLIGGTKFLAPGTPARFSGSLLGGKAALTLSGVQPEDEAEYYCVLWYSNRWVFGGGTKLTVL

SEQ ID NO: 1413 - DNA, 1506 bp, synthetic construct
  misc_feature 1..1506: note = ME86H11 HL x I2C HL
  source 1..1506: mol_type = other DNA
caggtgcagctggtccagtctggggctgaagtgaagaggcctggggcttcagtgaaagtgtcctgcagggcttcgggctataccttcaccagctactggttgcactgggttagacaggggcctggacaaaggcttgagtggataggcatgattgatccttccaatagtgacactaggtttaatccgaacttcaaggacagggccacattcactgtagacacatctgccagcacagcctacatggagctcagcagcctgacatctgaggacactgcagtctattactgtgccacatatggtagctacgtttcccctctggactactggggtcaaggaacctcggtcaccgtctcctcaggtggtggtggttctggcggcggcggctccggtggtggtggttctgacatcgtgatgacccagactccattctccctacctgtgacacttggagagacggtttctatcagctgcaagtccagtcagtcccttttatatactagcagtcagaagaactacttggcctggtacctgcagaaaccaggtcagtctcctcaactgctgatttactgggcatccactagggaatctggggtccctgatcgcttctcaggcagtggatctgggacagatttcactctcaaaatctccagagtggaggctgaggacgtgggagtttattactgtcagcaatattatgcctatccgtggacgttcggtggaggcacaaagttggagatcaaatccggaggtggtggatccgaggtgcagctggtcgagtctggaggaggattggtgcagcctggagggtcattgaaactctcatgtgcagcctctggattcaccttcaataagtacgccatgaactgggtccgccaggctccaggaaagggtttggaatgggttgctcgcataagaagtaaatataataattatgcaacatattatgccgattcagtgaaagacaggttcaccatctccagagatgattcaaaaaacactgcctatctacaaatgaacaacttgaaaactgaggacactgccgtgtactactgtgtgagacatgggaacttcggtaatagctacatatcctactgggcttactggggccaagggactctggtcaccgtctcctcaggtggtggtggttctggcggcggcggctccggtggtggtggttctcagactgttgtgactcaggaaccttcactcaccgtatcacctggtggaacagtcacactcacttgtggctcctcgactggggctgttacatctggcaactacccaaactgggtccaacaaaaaccaggtcaggcaccccgtggtctaataggtgggactaagttcctcgcccccggtactcctgccagattctcaggctccctgcttggaggcaaggctgccctcaccctctcaggggtacagccagaggatgaggcagaatattactgtgttctatggtacagcaaccgctgggtgttcggtggaggaaccaaactgactgtccta

SEQ ID NO: 1414 - protein, 119 aa, synthetic construct
  REGION 1..119: note = ME62A12-H
QVQLVQSGAEVVKPGASVKVSCKASGYTFTSYWLHWVRQTPGQGLEWIGMIDPSNSDTRFNPNFKDKVTFTVDTSASTAYMELSSLRSEDTAVYYCATYGSYVSPLDYWGQGTSVTVSS

SEQ ID NO: 1415 - protein, 5 aa, synthetic construct
  REGION 1..5: note = ME62A12-HCDR1
SYWLH

SEQ ID NO: 1416 - protein, 17 aa, synthetic construct
  REGION 1..17: note = ME62A12-HCDR2
MIDPSNSDTRFNPNFKD

SEQ ID NO: 1417 - protein, 10 aa, synthetic construct
  REGION 1..10: note = ME62A12-HCDR3
YGSYVSPLDY

SEQ ID NO: 1418 - DNA, 357 bp, synthetic construct
  misc_feature 1..357: note = ME62A12-H
  source 1..357: mol_type = other DNA
caggtgcagctggtccagtctggggctgaagtggtgaagcctggggcttcagtgaaagtgtcctgcaaggcttcgggctataccttcaccagctactggttgcactgggttagacagacgcctggacaagggcttgagtggataggcatgattgatccttccaatagtgacactaggtttaatccgaacttcaaggacaaggtcacattcactgtagacacatctgccagcacagcctacatggaactcagcagcctgagatctgaggacactgcagtctattactgtgccacatatggtagctacgtttcccctctggactactggggtcaaggaacctcggtcaccgtctcctca

SEQ ID NO: 1419 - protein, 113 aa, synthetic construct
  REGION 1..113: note = ME62A12-L
DIVMTQTPLSLPVTLGEKVSVSCKSSQSLLYTSSQKNYLAWYQQKPGQSPKLLIYWASTRESGVPDRFSGSGSGTDFTLTISRVEAEDLGVYYCQQYYAYPWTFGGGTKLEIK

SEQ ID NO: 1420 - protein, 17 aa, synthetic construct
  REGION 1..17: note = ME62A12-LCDR1
KSSQSLLYTSSQKNYLA

SEQ ID NO: 1421 - protein, 7 aa, synthetic construct
  REGION 1..7: note = ME62A12-LCDR2
WASTRES

SEQ ID NO: 1422 - protein, 9 aa, synthetic construct
  REGION 1..9: note = ME62A12-LCDR3
QQYYAYPWT

SEQ ID NO: 1423 - DNA, 339 bp, synthetic construct
  misc_feature 1..339: note = ME62A12-L
  source 1..339: mol_type = other DNA
gacatcgtgatgacccagactccactctccctacctgtgacacttggagagaaggtttctgtcagctgcaagtccagtcagtcccttttatatactagcagtcagaagaactacttggcctggtaccagcagaaaccaggtcagtctcctaaactgctgatttactgggcatccactagggaatctggggtccctgatcgcttctcaggcagtggatctgggacagatttcactctcacaatctccagagtggaggctgaggacctgggagtttattactgtcagcaatattatgcctatccgtggacgttcggtggaggcacaaagttggagatcaaa

SEQ ID NO: 1424 - protein, 247 aa, synthetic construct
  REGION 1..247: note = ME62A12-HL
QVQLVQSGAEVVKPGASVKVSCKASGYTFTSYWLHWVRQTPGQGLEWIGMIDPSNSDTRFNPNFKDKVTFTVDTSASTAYMELSSLRSEDTAVYYCATYGSYVSPLDYWGQGTSVTVSSGGGGSGGGGSGGGGSDIVMTQTPLSLPVTLGEKVSVSCKSSQSLLYTSSQKNYLAWYQQKPGQSPKLLIYWASTRESGVPDRFSGSGSGTDFTLTISRVEAEDLGVYYCQQYYAYPWTFGGGTKLEIK

SEQ ID NO: 1425 - DNA, 741 bp, synthetic construct
  misc_feature 1..741: note = ME62A12-HL
  source 1..741: mol_type = other DNA
caggtgcagctggtccagtctggggctgaagtggtgaagcctggggcttcagtgaaagtgtcctgcaaggcttcgggctataccttcaccagctactggttgcactgggttagacagacgcctggacaagggcttgagtggataggcatgattgatccttccaatagtgacactaggtttaatccgaacttcaaggacaaggtcacattcactgtagacacatctgccagcacagcctacatggaactcagcagcctgagatctgaggacactgcagtctattactgtgccacatatggtagctacgtttcccctctggactactggggtcaaggaacctcggtcaccgtctcctcaggtggtggtggttctggcggcggcggctccggtggtggtggttctgacatcgtgatgacccagactccactctccctacctgtgacacttggagagaaggtttctgtcagctgcaagtccagtcagtcccttttatatactagcagtcagaagaactacttggcctggtaccagcagaaaccaggtcagtctcctaaactgctgatttactgggcatccactagggaatctggggtccctgatcgcttctcaggcagtggatctgggacagatttcactctcacaatctccagagtggaggctgaggacctgggagtttattactgtcagcaatattatgcctatccgtggacgttcggtggaggcacaaagttggagatcaaa

SEQ ID NO: 1426 - protein, 502 aa, synthetic construct
  REGION 1..502: note = ME62A12 HL x I2C HL
QVQLVQSGAEVVKPGASVKVSCKASGYTFTSYWLHWVRQTPGQGLEWIGMIDPSNSDTRFNPNFKDKVTFTVDTSASTAYMELSSLRSEDTAVYYCATYGSYVSPLDYWGQGTSVTVSSGGGGSGGGGSGGGGSDIVMTQTPLSLPVTLGEKVSVSCKSSQSLLYTSSQKNYLAWYQQKPGQSPKLLIYWASTRESGVPDRFSGSGSGTDFTLTISRVEAEDLGVYYCQQYYAYPWTFGGGTKLEIKSGGGGSEVQLVESGGGLVQPGGSLKLSCAASGFTFNKYAMNWVRQAPGKGLEWVARIRSKYNNYATYYADSVKDRFTISRDDSKNTAYLQMNNLKTEDTAVYYCVRHGNFGNSYISYWAYWGQGTLVTVSSGGGGSGGGGSGGGGSQTVVTQEPSLTVSPGGTVTLTCGSSTGAVTSGNYPNWVQQKPGQAPRGLIGGTKFLAPGTPARFSGSLLGGKAALTLSGVQPEDEAEYYCVLWYSNRWVFGGGTKLTVL

SEQ ID NO: 1427 - DNA, 1506 bp, synthetic construct
  misc_feature 1..1506: note = ME62A12 HL x I2C HL
  source 1..1506: mol_type = other DNA
caggtgcagctggtccagtctggggctgaagtggtgaagcctggggcttcagtgaaagtgtcctgcaaggcttcgggctataccttcaccagctactggttgcactgggttagacagacgcctggacaagggcttgagtggataggcatgattgatccttccaatagtgacactaggtttaatccgaacttcaaggacaaggtcacattcactgtagacacatctgccagcacagcctacatggaactcagcagcctgagatctgaggacactgcagtctattactgtgccacatatggtagctacgtttcccctctggactactggggtcaaggaacctcggtcaccgtctcctcaggtggtggtggttctggcggcggcggctccggtggtggtggttctgacatcgtgatgacccagactccactctccctacctgtgacacttggagagaaggtttctgtcagctgcaagtccagtcagtcccttttatatactagcagtcagaagaactacttggcctggtaccagcagaaaccaggtcagtctcctaaactgctgatttactgggcatccactagggaatctggggtccctgatcgcttctcaggcagtggatctgggacagatttcactctcacaatctccagagtggaggctgaggacctgggagtttattactgtcagcaatattatgcctatccgtggacgttcggtggaggcacaaagttggagatcaaatccggaggtggtggatccgaggtgcagctggtcgagtctggaggaggattggtgcagcctggagggtcattgaaactctcatgtgcagcctctggattcaccttcaataagtacgccatgaactgggtccgccaggctccaggaaagggtttggaatgggttgctcgcataagaagtaaatataataattatgcaacatattatgccgattcagtgaaagacaggttcaccatctccagagatgattcaaaaaacactgcctatctacaaatgaacaacttgaaaactgaggacactgccgtgtactactgtgtgagacatgggaacttcggtaatagctacatatcctactgggcttactggggccaagggactctggtcaccgtctcctcaggtggtggtggttctggcggcggcggctccggtggtggtggttctcagactgttgtgactcaggaaccttcactcaccgtatcacctggtggaacagtcacactcacttgtggctcctcgactggggctgttacatctggcaactacccaaactgggtccaacaaaaaccaggtcaggcaccccgtggtctaataggtgggactaagttcctcgcccccggtactcctgccagattctcaggctccctgcttggaggcaaggctgccctcaccctctcaggggtacagccagaggatgaggcagaatattactgtgttctatggtacagcaaccgctgggtgttcggtggaggaaccaaactgactgtccta

SEQ ID NO: 1428 - protein, 119 aa, synthetic construct
  REGION 1..119: note = ME63F2-H
QVQLVQSGAEVKRPGASVKVSCKASGYTFTSYWLHWVRQTPGQRLEWIGMIDPSNSDTRFNPNFKDRVTMTVDTSANTAYMELSSLRSEDTAVYYCATYGSYVSPLDYWGQGTSVTVSS

SEQ ID NO: 1429 - protein, 5 aa, synthetic construct
  REGION 1..5: note = ME63F2-HCDR1
SYWLH

SEQ ID NO: 1430 - protein, 17 aa, synthetic construct
  REGION 1..17: note = ME63F2-HCDR2
MIDPSNSDTRFNPNFKD

SEQ ID NO: 1431 - protein, 10 aa, synthetic construct
  REGION 1..10: note = ME63F2-HCDR3
YGSYVSPLDY

SEQ ID NO: 1432 - DNA, 357 bp, synthetic construct
  misc_feature 1..357: note = ME63F2-H
  source 1..357: mol_type = other DNA
caggtgcagctggtccagtctggggctgaagtgaagaggcctggggcttcagtgaaagtgtcctgcaaggcttcgggctataccttcaccagctactggttgcactgggttagacagacgcctggacaaaggcttgagtggataggcatgattgatccttccaatagtgacactaggtttaatccgaacttcaaggacagggtcacaatgactgtagacacatctgccaacacagcctacatggaactcagcagcctgagatctgaggacactgcagtctattactgtgccacatatggtagctacgtttcccctctggactactggggtcaaggaacctcggtcaccgtctcctca

SEQ ID NO: 1433 - protein, 113 aa, synthetic construct
  REGION 1..113: note = ME63F2-L
DIVMTQTPLSLPVTVGEQASISCKSSQSLLYTSSQKNYLAWYQQKPGQSPKLLIYWASTRESGVPDRFSGSGSGTDFTLKISRVEAEDLGVYYCQQYYAYPWTFGGGTKLEIK

SEQ ID NO: 1434 - protein, 17 aa, synthetic construct
  REGION 1..17: note = ME63F2-LCDR1
KSSQSLLYTSSQKNYLA

SEQ ID NO: 1435 - protein, 7 aa, synthetic construct
  REGION 1..7: note = ME63F2-LCDR2
WASTRES

SEQ ID NO: 1436 - protein, 9 aa, synthetic construct
  REGION 1..9: note = ME63F2-LCDR3
QQYYAYPWT

SEQ ID NO: 1437 - DNA, 339 bp, synthetic construct
  misc_feature 1..339: note = ME63F2-L
  source 1..339: mol_type = other DNA
gacatcgtgatgacccagactccactctccctacctgtgacagttggagagcaggcttctatcagctgcaagtccagtcagtcccttttatatactagcagtcagaagaactacttggcctggtaccagcagaaaccaggtcagtctcctaaactgctgatttactgggcatccactagggaatctggggtccctgatcgcttctcaggcagtggatctgggacagatttcactctcaaaatctccagagtggaggctgaggacctgggagtttattactgtcagcaatattatgcctatccgtggacgttcggtggaggcacaaagttggagatcaaa

SEQ ID NO: 1438 - protein, 247 aa, synthetic construct
  REGION 1..247: note = ME63F2-HL
QVQLVQSGAEVKRPGASVKVSCKASGYTFTSYWLHWVRQTPGQRLEWIGMIDPSNSDTRFNPNFKDRVTMTVDTSANTAYMELSSLRSEDTAVYYCATYGSYVSPLDYWGQGTSVTVSSGGGGSGGGGSGGGGSDIVMTQTPLSLPVTVGEQASISCKSSQSLLYTSSQKNYLAWYQQKPGQSPKLLIYWASTRESGVPDRFSGSGSGTDFTLKISRVEAEDLGVYYCQQYYAYPWTFGGGTKLEIK

SEQ ID NO: 1439 - DNA, 741 bp, synthetic construct
  misc_feature 1..741: note = ME63F2-HL
  source 1..741: mol_type = other DNA
caggtgcagctggtccagtctggggctgaagtgaagaggcctggggcttcagtgaaagtgtcctgcaaggcttcgggctataccttcaccagctactggttgcactgggttagacagacgcctggacaaaggcttgagtggataggcatgattgatccttccaatagtgacactaggtttaatccgaacttcaaggacagggtcacaatgactgtagacacatctgccaacacagcctacatggaactcagcagcctgagatctgaggacactgcagtctattactgtgccacatatggtagctacgtttcccctctggactactggggtcaaggaacctcggtcaccgtctcctcaggtggtggtggttctggcggcggcggctccggtggtggtggttctgacatcgtgatgacccagactccactctccctacctgtgacagttggagagcaggcttctatcagctgcaagtccagtcagtcccttttatatactagcagtcagaagaactacttggcctggtaccagcagaaaccaggtcagtctcctaaactgctgatttactgggcatccactagggaatctggggtccctgatcgcttctcaggcagtggatctgggacagatttcactctcaaaatctccagagtggaggctgaggacctgggagtttattactgtcagcaatattatgcctatccgtggacgttcggtggaggcacaaagttggagatcaaa

SEQ ID NO: 1440 - protein, 502 aa, synthetic construct
  REGION 1..502: note = ME63F2 HL x I2C HL
QVQLVQSGAEVKRPGASVKVSCKASGYTFTSYWLHWVRQTPGQRLEWIGMIDPSNSDTRFNPNFKDRVTMTVDTSANTAYMELSSLRSEDTAVYYCATYGSYVSPLDYWGQGTSVTVSSGGGGSGGGGSGGGGSDIVMTQTPLSLPVTVGEQASISCKSSQSLLYTSSQKNYLAWYQQKPGQSPKLLIYWASTRESGVPDRFSGSGSGTDFTLKISRVEAEDLGVYYCQQYYAYPWTFGGGTKLEIKSGGGGSEVQLVESGGGLVQPGGSLKLSCAASGFTFNKYAMNWVRQAPGKGLEWVARIRSKYNNYATYYADSVKDRFTISRDDSKNTAYLQMNNLKTEDTAVYYCVRHGNFGNSYISYWAYWGQGTLVTVSSGGGGSGGGGSGGGGSQTVVTQEPSLTVSPGGTVTLTCGSSTGAVTSGNYPNWVQQKPGQAPRGLIGGTKFLAPGTPARFSGSLLGGKAALTLSGVQPEDEAEYYCVLWYSNRWVFGGGTKLTVL

SEQ ID NO: 1441 - DNA, 1506 bp, synthetic construct
  misc_feature 1..1506: note = ME63F2 HL x I2C HL
  source 1..1506: mol_type = other DNA
caggtgcagctggtccagtctggggctgaagtgaagaggcctggggcttcagtgaaagtgtcctgcaaggcttcgggctataccttcaccagctactggttgcactgggttagacagacgcctggacaaaggcttgagtggataggcatgattgatccttccaatagtgacactaggtttaatccgaacttcaaggacagggtcacaatgactgtagacacatctgccaacacagcctacatggaactcagcagcctgagatctgaggacactgcagtctattactgtgccacatatggtagctacgtttcccctctggactactggggtcaaggaacctcggtcaccgtctcctcaggtggtggtggttctggcggcggcggctccggtggtggtggttctgacatcgtgatgacccagactccactctccctacctgtgacagttggagagcaggcttctatcagctgcaagtccagtcagtcccttttatatactagcagtcagaagaactacttggcctggtaccagcagaaaccaggtcagtctcctaaactgctgatttactgggcatccactagggaatctggggtccctgatcgcttctcaggcagtggatctgggacagatttcactctcaaaatctccagagtggaggctgaggacctgggagtttattactgtcagcaatattatgcctatccgtggacgttcggtggaggcacaaagttggagatcaaatccggaggtggtggatccgaggtgcagctggtcgagtctggaggaggattggtgcagcctggagggtcattgaaactctcatgtgcagcctctggattcaccttcaataagtacgccatgaactgggtccgccaggctccaggaaagggtttggaatgggttgctcgcataagaagtaaatataataattatgcaacatattatgccgattcagtgaaagacaggttcaccatctccagagatgattcaaaaaacactgcctatctacaaatgaacaacttgaaaactgaggacactgccgtgtactactgtgtgagacatgggaacttcggtaatagctacatatcctactgggcttactggggccaagggactctggtcaccgtctcctcaggtggtggtggttctggcggcggcggctccggtggtggtggttctcagactgttgtgactcaggaaccttcactcaccgtatcacctggtggaacagtcacactcacttgtggctcctcgactggggctgttacatctggcaactacccaaactgggtccaacaaaaaccaggtcaggcaccccgtggtctaataggtgggactaagttcctcgcccccggtactcctgccagattctcaggctccctgcttggaggcaaggctgccctcaccctctcaggggtacagccagaggatgaggcagaatattactgtgttctatggtacagcaaccgctgggtgttcggtggaggaaccaaactgactgtccta

SEQ ID NO: 1442 - protein, 119 aa, synthetic construct
  REGION 1..119: note = ME62D11-H
QVQLVQSGPEVVKPGASVKVSCKASGYTFTSYWLHWVKQAPGQGLEWIGMIDPSNSDTRFNPNFKDRATLTVDTSASTAYMLLSSLRSEDTAVYYCATYGSYVSPLDYWGQGTSVTVSS

SEQ ID NO: 1443 - protein, 5 aa, synthetic construct
  REGION 1..5: note = ME62D11-HCDR1
SYWLH

SEQ ID NO: 1444 - protein, 17 aa, synthetic construct
  REGION 1..17: note = ME62D11-HCDR2
MIDPSNSDTRFNPNFKD

SEQ ID NO: 1445 - protein, 10 aa, synthetic construct
  REGION 1..10: note = ME62D11-HCDR3
YGSYVSPLDY

SEQ ID NO: 1446 - DNA, 357 bp, synthetic construct
  misc_feature 1..357: note = ME62D11-H
  source 1..357: mol_type = other DNA
caggtgcagctggtccagtctgggcctgaagtggtgaagcctggggcttcagtgaaagtgtcctgcaaggcttcgggctataccttcaccagctactggttgcactgggttaaacaggcgcctggacaagggcttgagtggataggcatgattgatccttccaatagtgacactaggtttaatccgaacttcaaggacagggccacattgactgtagacacatctgccagcacagcctacatgctactcagcagcctgagatctgaggacactgcagtctattactgtgccacatatggtagctacgtttcccctctggactactggggtcaaggaacctcggtcaccgtctcctca

SEQ ID NO: 1447 - protein, 113 aa, synthetic construct
  REGION 1..113: note = ME62D11-L
DIVMTQTPSSLPVTLGETVSISCKSSQSLLYTSSQKNYLAWYLQKPGQSPQLLIYWASTRESGVPDRFSGSGSGTDFTLTISRVKAEDVAVYYCQQYYAYPWTFGGGTKLEIK

SEQ ID NO: 1448 - protein, 17 aa, synthetic construct
  REGION 1..17: note = ME62D11-LCDR1
KSSQSLLYTSSQKNYLA

SEQ ID NO: 1449 - protein, 7 aa, synthetic construct
  REGION 1..7: note = ME62D11-LCDR2
WASTRES

SEQ ID NO: 1450 - protein, 9 aa, synthetic construct
  REGION 1..9: note = ME62D11-LCDR3
QQYYAYPWT

SEQ ID NO: 1451 - DNA, 339 bp, synthetic construct
  misc_feature 1..339: note = ME62D11-L
  source 1..339: mol_type = other DNA
gacatcgtgatgacccagactccatcctccctacctgtgacacttggagagacggtttctatcagctgcaagtccagtcagtcccttttatatactagcagtcagaagaactacttggcctggtacctgcagaaaccaggtcagtctcctcaactgctgatttactgggcatccactagggaatctggggtccctgatcgcttctcaggcagtggatctgggacagatttcactctcacaatctccagagtgaaggctgaggacgtggcagtttattactgtcagcaatattatgcctatccgtggacgttcggtggaggcacaaagttggagatcaaa

SEQ ID NO: 1452 - protein, 247 aa, synthetic construct
  REGION 1..247: note = ME62D11-HL
QVQLVQSGPEVVKPGASVKVSCKASGYTFTSYWLHWVKQAPGQGLEWIGMIDPSNSDTRFNPNFKDRATLTVDTSASTAYMLLSSLRSEDTAVYYCATYGSYVSPLDYWGQGTSVTVSSGGGGSGGGGSGGGGSDIVMTQTPSSLPVTLGETVSISCKSSQSLLYTSSQKNYLAWYLQKPGQSPQLLIYWASTRESGVPDRFSGSGSGTDFTLTISRVKAEDVAVYYCQQYYAYPWTFGGGTKLEIK

SEQ ID NO: 1453 - DNA, 741 bp, synthetic construct
  misc_feature 1..741: note = ME62D11-HL
  source 1..741: mol_type = other DNA
caggtgcagctggtccagtctgggcctgaagtggtgaagcctggggcttcagtgaaagtgtcctgcaaggcttcgggctataccttcaccagctactggttgcactgggttaaacaggcgcctggacaagggcttgagtggataggcatgattgatccttccaatagtgacactaggtttaatccgaacttcaaggacagggccacattgactgtagacacatctgccagcacagcctacatgctactcagcagcctgagatctgaggacactgcagtctattactgtgccacatatggtagctacgtttcccctctggactactggggtcaaggaacctcggtcaccgtctcctcaggtggtggtggttctggcggcggcggctccggtggtggtggttctgacatcgtgatgacccagactccatcctccctacctgtgacacttggagagacggtttctatcagctgcaagtccagtcagtcccttttatatactagcagtcagaagaactacttggcctggtacctgcagaaaccaggtcagtctcctcaactgctgatttactgggcatccactagggaatctggggtccctgatcgcttctcaggcagtggatctgggacagatttcactctcacaatctccagagtgaaggctgaggacgtggcagtttattactgtcagcaatattatgcctatccgtggacgttcggtggaggcacaaagttggagatcaaa

SEQ ID NO: 1454 - protein, 502 aa, synthetic construct
  REGION 1..502: note = ME62D11 HL x I2C HL
QVQLVQSGPEVVKPGASVKVSCKASGYTFTSYWLHWVKQAPGQGLEWIGMIDPSNSDTRFNPNFKDRATLTVDTSASTAYMLLSSLRSEDTAVYYCATYGSYVSPLDYWGQGTSVTVSSGGGGSGGGGSGGGGSDIVMTQTPSSLPVTLGETVSISCKSSQSLLYTSSQKNYLAWYLQKPGQSPQLLIYWASTRESGVPDRFSGSGSGTDFTLTISRVKAEDVAVYYCQQYYAYPWTFGGGTKLEIKSGGGGSEVQLVESGGGLVQPGGSLKLSCAASGFTFNKYAMNWVRQAPGKGLEWVARIRSKYNNYATYYADSVKDRFTISRDDSKNTAYLQMNNLKTEDTAVYYCVRHGNFGNSYISYWAYWGQGTLVTVSSGGGGSGGGGSGGGGSQTVVTQEPSLTVSPGGTVTLTCGSSTGAVTSGNYPNWVQQKPGQAPRGLIGGTKFLAPGTPARFSGSLLGGKAALTLSGVQPEDEAEYYCVLWYSNRWVFGGGTKLTVL

SEQ ID NO: 1455 - DNA, 1506 bp, synthetic construct
  misc_feature 1..1506: note = ME62D11 HL x I2C HL
  source 1..1506: mol_type = other DNA
caggtgcagctggtccagtctgggcctgaagtggtgaagcctggggcttcagtgaaagtgtcctgcaaggcttcgggctataccttcaccagctactggttgcactgggttaaacaggcgcctggacaagggcttgagtggataggcatgattgatccttccaatagtgacactaggtttaatccgaacttcaaggacagggccacattgactgtagacacatctgccagcacagcctacatgctactcagcagcctgagatctgaggacactgcagtctattactgtgccacatatggtagctacgtttcccctctggactactggggtcaaggaacctcggtcaccgtctcctcaggtggtggtggttctggcggcggcggctccggtggtggtggttctgacatcgtgatgacccagactccatcctccctacctgtgacacttggagagacggtttctatcagctgcaagtccagtcagtcccttttatatactagcagtcagaagaactacttggcctggtacctgcagaaaccaggtcagtctcctcaactgctgatttactgggcatccactagggaatctggggtccctgatcgcttctcaggcagtggatctgggacagatttcactctcacaatctccagagtgaaggctgaggacgtggcagtttattactgtcagcaatattatgcctatccgtggacgttcggtggaggcacaaagttggagatcaaatccggaggtggtggatccgaggtgcagctggtcgagtctggaggaggattggtgcagcctggagggtcattgaaactctcatgtgcagcctctggattcaccttcaataagtacgccatgaactgggtccgccaggctccaggaaagggtttggaatgggttgctcgcataagaagtaaatataataattatgcaacatattatgccgattcagtgaaagacaggttcaccatctccagagatgattcaaaaaacactgcctatctacaaatgaacaacttgaaaactgaggacactgccgtgtactactgtgtgagacatgggaacttcggtaatagctacatatcctactgggcttactggggccaagggactctggtcaccgtctcctcaggtggtggtggttctggcggcggcggctccggtggtggtggttctcagactgttgtgactcaggaaccttcactcaccgtatcacctggtggaacagtcacactcacttgtggctcctcgactggggctgttacatctggcaactacccaaactgggtccaacaaaaaccaggtcaggcaccccgtggtctaataggtgggactaagttcctcgcccccggtactcctgccagattctcaggctccctgcttggaggcaaggctgccctcaccctctcaggggtacagccagaggatgaggcagaatattactgtgttctatggtacagcaaccgctgggtgttcggtggaggaaccaaactgactgtccta

SEQ ID NO: 1456 - protein, 119 aa, synthetic construct
  REGION 1..119: note = ME62C10-H
QVQLVQSGAELKKPGASVKVSCKASGYTFTSYWLHWVKQAPGQRLEWIGMIDPSNSDTRFNPNFKDRVTITVDTSANTAYMELSSLRSEDTAVYYCATYGSYVSPLDYWGQGTSVTVSS

SEQ ID NO: 1457 - protein, 5 aa, synthetic construct
  REGION 1..5: note = ME62C10-HCDR1
SYWLH

SEQ ID NO: 1458 - protein, 17 aa, synthetic construct
  REGION 1..17: note = ME62C10-HCDR2
MIDPSNSDTRFNPNFKD

SEQ ID NO: 1459 - protein, 10 aa, synthetic construct
  REGION 1..10: note = ME62C10-HCDR3
YGSYVSPLDY

SEQ ID NO: 1460 - DNA, 357 bp, synthetic construct
  misc_feature 1..357: note = ME62C10-H
  source 1..357: mol_type = other DNA
caggtgcagctggtccagtctggggctgaactgaagaagcctggggcttcagtgaaagtgtcctgcaaggcttcgggctataccttcaccagctactggttgcactgggttaaacaggcgcctggacaaaggcttgagtggataggcatgattgatccttccaatagtgacactaggtttaatccgaacttcaaggacagggtcacaatcactgtagacacatctgccaacacagcctacatggagctcagcagcctgagatctgaggacactgcagtctattactgtgccacatatggtagctacgtttcccctctggactactggggtcaaggaacctcggtcaccgtctcctca

SEQ ID NO: 1461 - protein, 113 aa, synthetic construct
  REGION 1..113: note = ME62C10-L
DIVMTQTPPSLTVTPGEQVSISCKSSQSLLYTSSQKNYLAWYLQKPGQSPKLLIYWASTRESGVPDRFSGSGSGTDFTLKISSVEADDVGVYYCQQYYAYPWTFGGGTKLEIK

SEQ ID NO: 1462 - protein, 17 aa, synthetic construct
  REGION 1..17: note = ME62C10-LCDR1
KSSQSLLYTSSQKNYLA

SEQ ID NO: 1463 - protein, 7 aa, synthetic construct
  REGION 1..7: note = ME62C10-LCDR2
WASTRES

SEQ ID NO: 1464 - protein, 9 aa, synthetic construct
  REGION 1..9: note = ME62C10-LCDR3
QQYYAYPWT

SEQ ID NO: 1465 - DNA, 339 bp, synthetic construct
  misc_feature 1..339: note = ME62C10-L
  source 1..339: mol_type = other DNA
gacatcgtgatgacccagactccaccctccctaactgtgacacctggagagcaggtttctatcagctgcaagtccagtcagtcccttttatatactagcagtcagaagaactacttggcctggtacctgcagaaaccaggtcagtctcctaaactgctgatttactgggcatccactagggaatctggggtccctgatcgcttctcaggcagtggatctgggacagatttcactctcaaaatctccagtgtggaggctgacgacgtgggagtttattactgtcagcaatattatgcctatccgtggacgttcggtggaggcacaaagttggagatcaaa

SEQ ID NO: 1466 - protein, 247 aa, synthetic construct
  REGION 1..247: note = ME62C10-HL
QVQLVQSGAELKKPGASVKVSCKASGYTFTSYWLHWVKQAPGQRLEWIGMIDPSNSDTRFNPNFKDRVTITVDTSANTAYMELSSLRSEDTAVYYCATYGSYVSPLDYWGQGTSVTVSSGGGGSGGGGSGGGGSDIVMTQTPPSLTVTPGEQVSISCKSSQSLLYTSSQKNYLAWYLQKPGQSPKLLIYWASTRESGVPDRFSGSGSGTDFTLKISSVEADDVGVYYCQQYYAYPWTFGGGTKLEIK

SEQ ID NO: 1467 - DNA, 741 bp, synthetic construct
  misc_feature 1..741: note = ME62C10-HL
  source 1..741: mol_type = other DNA
caggtgcagctggtccagtctggggctgaactgaagaagcctggggcttcagtgaaagtgtcctgcaaggcttcgggctataccttcaccagctactggttgcactgggttaaacaggcgcctggacaaaggcttgagtggataggcatgattgatccttccaatagtgacactaggtttaatccgaacttcaaggacagggtcacaatcactgtagacacatctgccaacacagcctacatggagctcagcagcctgagatctgaggacactgcagtctattactgtgccacatatggtagctacgtttcccctctggactactggggtcaaggaacctcggtcaccgtctcctcaggtggtggtggttctggcggcggcggctccggtggtggtggttctgacatcgtgatgacccagactccaccctccctaactgtgacacctggagagcaggtttctatcagctgcaagtccagtcagtcccttttatatactagcagtcagaagaactacttggcctggtacctgcagaaaccaggtcagtctcctaaactgctgatttactgggcatccactagggaatctggggtccctgatcgcttctcaggcagtggatctgggacagatttcactctcaaaatctccagtgtggaggctgacgacgtgggagtttattactgtcagcaatattatgcctatccgtggacgttcggtggaggcacaaagttggagatcaaa

SEQ ID NO: 1468 - protein, 502 aa, synthetic construct
  REGION 1..502: note = ME62C10 HL x I2C HL
QVQLVQSGAELKKPGASVKVSCKASGYTFTSYWLHWVKQAPGQRLEWIGMIDPSNSDTRFNPNFKDRVTITVDTSANTAYMELSSLRSEDTAVYYCATYGSYVSPLDYWGQGTSVTVSSGGGGSGGGGSGGGGSDIVMTQTPPSLTVTPGEQVSISCKSSQSLLYTSSQKNYLAWYLQKPGQSPKLLIYWASTRESGVPDRFSGSGSGTDFTLKISSVEADDVGVYYCQQYYAYPWTFGGGTKLEIKSGGGGSEVQLVESGGGLVQPGGSLKLSCAASGFTFNKYAMNWVRQAPGKGLEWVARIRSKYNNYATYYADSVKDRFTISRDDSKNTAYLQMNNLKTEDTAVYYCVRHGNFGNSYISYWAYWGQGTLVTVSSGGGGSGGGGSGGGGSQTVVTQEPSLTVSPGGTVTLTCGSSTGAVTSGNYPNWVQQKPGQAPRGLIGGTKFLAPGTPARFSGSLLGGKAALTLSGVQPEDEAEYYCVLWYSNRWVFGGGTKLTVL

SEQ ID NO: 1469 - DNA, 1506 bp, synthetic construct
  misc_feature 1..1506: note = ME62C10 HL x I2C HL
  source 1..1506: mol_type = other DNA
caggtgcagctggtccagtctggggctgaactgaagaagcctggggcttcagtgaaagtgtcctgcaaggcttcgggctataccttcaccagctactggttgcactgggttaaacaggcgcctggacaaaggcttgagtggataggcatgattgatccttccaatagtgacactaggtttaatccgaacttcaaggacagggtcacaatcactgtagacacatctgccaacacagcctacatggagctcagcagcctgagatctgaggacactgcagtctattactgtgccacatatggtagctacgtttcccctctggactactggggtcaaggaacctcggtcaccgtctcctcaggtggtggtggttctggcggcggcggctccggtggtggtggttctgacatcgtgatgacccagactccaccctccctaactgtgacacctggagagcaggtttctatcagctgcaagtccagtcagtcccttttatatactagcagtcagaagaactacttggcctggtacctgcagaaaccaggtcagtctcctaaactgctgatttactgggcatccactagggaatctggggtccctgatcgcttctcaggcagtggatctgggacagatttcactctcaaaatctccagtgtggaggctgacgacgtgggagtttattactgtcagcaatattatgcctatccgtggacgttcggtggaggcacaaagttggagatcaaatccggaggtggtggatccgaggtgcagctggtcgagtctggaggaggattggtgcagcctggagggtcattgaaactctcatgtgcagcctctggattcaccttcaataagtacgccatgaactgggtccgccaggctccaggaaagggtttggaatgggttgctcgcataagaagtaaatataataattatgcaacatattatgccgattcagtgaaagacaggttcaccatctccagagatgattcaaaaaacactgcctatctacaaatgaacaacttgaaaactgaggacactgccgtgtactactgtgtgagacatgggaacttcggtaatagctacatatcctactgggcttactggggccaagggactctggtcaccgtctcctcaggtggtggtggttctggcggcggcggctccggtggtggtggttctcagactgttgtgactcaggaaccttcactcaccgtatcacctggtggaacagtcacactcacttgtggctcctcgactggggctgttacatctggcaactacccaaactgggtccaacaaaaaccaggtcaggcaccccgtggtctaataggtgggactaagttcctcgcccccggtactcctgccagattctcaggctccctgcttggaggcaaggctgccctcaccctctcaggggtacagccagaggatgaggcagaatattactgtgttctatggtacagcaaccgctgggtgttcggtggaggaaccaaactgactgtccta

SEQ ID NO: 1470 - protein, 119 aa, synthetic construct
  REGION 1..119: note = ME62A4-H
QVQLVQSGAEVMKPGASVKVSCRASGYTFTSYWLHWVRQAPGQGLEWIGMIDPSNSDTRFNPNFKDRVTMTVDTSSSTAYMELSSLRSEDTAVYYCATYGSYVSPLDYWGQGTSVTVSS

SEQ ID NO: 1471 - protein, 5 aa, synthetic construct
  REGION 1..5: note = ME62A4-HCDR1
SYWLH

SEQ ID NO: 1472 - protein, 17 aa, synthetic construct
  REGION 1..17: note = ME62A4-HCDR2
MIDPSNSDTRFNPNFKD

SEQ ID NO: 1473 - protein, 10 aa, synthetic construct
  REGION 1..10: note = ME62A4-HCDR3
YGSYVSPLDY

SEQ ID NO: 1474 - DNA, 357 bp, synthetic construct
  misc_feature 1..357: note = ME62A4-H
  source 1..357: mol_type = other DNA
caggtgcagctggtccagtctggggctgaagtgatgaagcctggggcttcagtgaaagtgtcctgcagggcttcgggctataccttcaccagctactggttgcactgggttagacaggcgcctggacaagggcttgagtggataggcatgattgatccttccaatagtgacactaggtttaatccgaacttcaaggacagggtcacaatgactgtagacacatcttccagcacagcctacatggagctcagcagcctgagatctgaggacactgcagtctattactgtgccacatatggtagctacgtttcccctctggactactggggtcaaggaacctcggtcaccgtctcctca

SEQ ID NO: 1475 - protein, 113 aa, synthetic construct
  REGION 1..113: note = ME62A4-L
DIVMTQTPFSLPVTAGETVSISCKSSQSLLYTSSQKNYLAWYLQKPGQSPQLLIYWASTRESGVPDRFSGSGSGTDFTLKISRVEAEDVGVYYCQQYYAYPWTFGGGTKLEIK

SEQ ID NO: 1476 - protein, 17 aa, synthetic construct
  REGION 1..17: note = ME62A4-LCDR1
KSSQSLLYTSSQKNYLA

SEQ ID NO: 1477 - protein, 7 aa, synthetic construct
  REGION 1..7: note = ME62A4-LCDR2
WASTRES

SEQ ID NO: 1478 - protein, 9 aa, synthetic construct
  REGION 1..9: note = ME62A4-LCDR3
QQYYAYPWT

SEQ ID NO: 1479 - DNA, 339 bp, synthetic construct
  misc_feature 1..339: note = ME62A4-L
  source 1..339: mol_type = other DNA
gacatcgtgatgacccagactccattctccctacctgtgacagctggagagacggtttctatcagctgcaagtccagtcagtcccttttatatactagcagtcagaagaactacttggcctggtacctgcagaaaccaggtcagtctcctcaactgctgatttactgggcatccactagggaatctggggtccctgatcgcttctcaggcagtggatctgggacagatttcactctcaaaatctccagagtggaggctgaggacgtgggagtttattactgtcagcaatattatgcctatccgtggacgttcggtggaggcacaaagttggagatcaaa

SEQ ID NO: 1480 - protein, 247 aa, synthetic construct
  REGION 1..247: note = ME62A4-HL
QVQLVQSGAEVMKPGASVKVSCRASGYTFTSYWLHWVRQAPGQGLEWIGMIDPSNSDTRFNPNFKDRVTMTVDTSSSTAYMELSSLRSEDTAVYYCATYGSYVSPLDYWGQGTSVTVSSGGGGSGGGGSGGGGSDIVMTQTPFSLPVTAGETVSISCKSSQSLLYTSSQKNYLAWYLQKPGQSPQLLIYWASTRESGVPDRFSGSGSGTDFTLKISRVEAEDVGVYYCQQYYAYPWTFGGGTKLEIK

SEQ ID NO: 1481 - DNA, 741 bp, synthetic construct
  misc_feature 1..741: note = ME62A4-HL
  source 1..741: mol_type = other DNA
caggtgcagctggtccagtctggggctgaagtgatgaagcctggggcttcagtgaaagtgtcctgcagggcttcgggctataccttcaccagctactggttgcactgggttagacaggcgcctggacaagggcttgagtggataggcatgattgatccttccaatagtgacactaggtttaatccgaacttcaaggacagggtcacaatgactgtagacacatcttccagcacagcctacatggagctcagcagcctgagatctgaggacactgcagtctattactgtgccacatatggtagctacgtttcccctctggactactggggtcaaggaacctcggtcaccgtctcctcaggtggtggtggttctggcggcggcggctccggtggtggtggttctgacatcgtgatgacccagactccattctccctacctgtgacagctggagagacggtttctatcagctgcaagtccagtcagtcccttttatatactagcagtcagaagaactacttggcctggtacctgcagaaaccaggtcagtctcctcaactgctgatttactgggcatccactagggaatctggggtccctgatcgcttctcaggcagtggatctgggacagatttcactctcaaaatctccagagtggaggctgaggacgtgggagtttattactgtcagcaatattatgcctatccgtggacgttcggtggaggcacaaagttggagatcaaa

SEQ ID NO: 1482 - protein, 502 aa, synthetic construct
  REGION 1..502: note = ME62A4 HL x I2C HL
QVQLVQSGAEVMKPGASVKVSCRASGYTFTSYWLHWVRQAPGQGLEWIGMIDPSNSDTRFNPNFKDRVTMTVDTSSSTAYMELSSLRSEDTAVYYCATYGSYVSPLDYWGQGTSVTVSSGGGGSGGGGSGGGGSDIVMTQTPFSLPVTAGETVSISCKSSQSLLYTSSQKNYLAWYLQKPGQSPQLLIYWASTRESGVPDRFSGSGSGTDFTLKISRVEAEDVGVYYCQQYYAYPWTFGGGTKLEIKSGGGGSEVQLVESGGGLVQPGGSLKLSCAASGFTFNKYAMNWVRQAPGKGLEWVARIRSKYNNYATYYADSVKDRFTISRDDSKNTAYLQMNNLKTEDTAVYYCVRHGNFGNSYISYWAYWGQGTLVTVSSGGGGSGGGGSGGGGSQTVVTQEPSLTVSPGGTVTLTCGSSTGAVTSGNYPNWVQQKPGQAPRGLIGGTKFLAPGTPARFSGSLLGGKAALTLSGVQPEDEAEYYCVLWYSNRWVFGGGTKLTVL

SEQ ID NO: 1483 - DNA, 1506 bp, synthetic construct
  misc_feature 1..1506: note = ME62A4 HL x I2C HL
  source 1..1506: mol_type = other DNA
caggtgcagctggtccagtctggggctgaagtgatgaagcctggggcttcagtgaaagtgtcctgcagggcttcgggctataccttcaccagctactggttgcactgggttagacaggcgcctggacaagggcttgagtggataggcatgattgatccttccaatagtgacactaggtttaatccgaacttcaaggacagggtcacaatgactgtagacacatcttccagcacagcctacatggagctcagcagcctgagatctgaggacactgcagtctattactgtgccacatatggtagctacgtttcccctctggactactggggtcaaggaacctcggtcaccgtctcctcaggtggtggtggttctggcggcggcggctccggtggtggtggttctgacatcgtgatgacccagactccattctccctacctgtgacagctggagagacggtttctatcagctgcaagtccagtcagtcccttttatatactagcagtcagaagaactacttggcctggtacctgcagaaaccaggtcagtctcctcaactgctgatttactgggcatccactagggaatctggggtccctgatcgcttctcaggcagtggatctgggacagatttcactctcaaaatctccagagtggaggctgaggacgtgggagtttattactgtcagcaatattatgcctatccgtggacgttcggtggaggcacaaagttggagatcaaatccggaggtggtggatccgaggtgcagctggtcgagtctggaggaggattggtgcagcctggagggtcattgaaactctcatgtgcagcctctggattcaccttcaataagtacgccatgaactgggtccgccaggctccaggaaagggtttggaatgggttgctcgcataagaagtaaatataataattatgcaacatattatgccgattcagtgaaagacaggttcaccatctccagagatgattcaaaaaacactgcctatctacaaatgaacaacttgaaaactgaggacactgccgtgtactactgtgtgagacatgggaacttcggtaatagctacatatcctactgggcttactggggccaagggactctggtcaccgtctcctcaggtggtggtggttctggcggcggcggctccggtggtggtggttctcagactgttgtgactcaggaaccttcactcaccgtatcacctggtggaacagtcacactcacttgtggctcctcgactggggctgttacatctggcaactacccaaactgggtccaacaaaaaccaggtcaggcaccccgtggtctaataggtgggactaagttcctcgcccccggtactcctgccagattctcaggctccctgcttggaggcaaggctgccctcaccctctcaggggtacagccagaggatgaggcagaatattactgtgttctatggtacagcaaccgctgggtgttcggtggaggaaccaaactgactgtccta

SEQ ID NO: 1484 - protein, 126 aa, Mus sp.
EVQLLEQSGAELVRPGTSVKMSCKAAGYTFTKYWIGWVKQRPGHGLEWIGDIHPGGGYANYNEKFKGKATLTADTSSSTAYMQLSRLTSDDSAIYYCARSGYDYGSSYDYHGMDFWGQGTTVTVSS

SEQ ID NO: 1485 - protein, 5 aa, Mus sp.
KYWIG

SEQ ID NO: 1486 - protein, 17 aa, Mus sp.
DIHPGGGYANYNEKFKG

SEQ ID NO: 1487 - protein, 16 aa, Mus sp.
SGYDYGSSYDYHGMDF

SEQ ID NO: 1488 - DNA, 378 bp, Mus sp.
  source 1..378: mol_type = genomic DNA
gaggtgcagctgctcgagcagtctggagctgagctggttaggcctgggacttcagtgaagatgtcctgcaaggctgctggatacaccttcactaagtactggataggttgggtaaagcagaggcctggacatggccttgagtggattggagatattcaccctggaggtggttatgctaactacaatgagaagttcaagggcaaggccacactgactgcagacacatcctccagcacagcctacatgcagctcagcagactgacatctgatgactccgccatctattactgtgcaagatcggggtatgactacggtagtagttacgattaccatggtatggacttctggggccaagggaccacggtcaccgtctcctca

SEQ ID NO: 1489 - protein, 107 aa, Mus sp.
ELQMTQSPASLSASVGEPVTFTCRASENIYSYLAWYQQKQGKSPQLLIYGATNLADGMSSRFSGSGSGRQYSLKISSLHPDDVATYYCQNVLSTPYTFGGGTKLEIK

SEQ ID NO: 1490 - protein, 11 aa, Mus sp.
RASENIYSYLA

SEQ ID NO: 1491 - protein, 7 aa, Mus sp.
GATNLAD

SEQ ID NO: 1492 - protein, 9 aa, Mus sp.
QNVLSTPYT

SEQ ID NO: 1493 - DNA, 321 bp, Mus sp.
  source 1..321: mol_type = genomic DNA
gagctccagatgacccagtctccagcctccctatctgcatctgtgggagaacctgtcaccttcacatgtcgagcaagtgagaatatttacagttatttagcatggtatcagcagaaacagggaaaatctcctcagctcctgatctatggtgcaaccaacttggcagatggcatgtcatcgaggttcagtggcagtggatctggtagacagtattctctcaagatcagtagcctgcatcctgacgatgttgcaacgtattactgtcaaaatgtgttaagtactccgtacacgttcggaggggggaccaagcttgagatcaaa

SEQ ID NO: 1494 - protein, 248 aa, Mus sp.
EVQLLEQSGAELVRPGTSVKMSCKAAGYTFTKYWIGWVKQRPGHGLEWIGDIHPGGGYANYNEKFKGKATLTADTSSSTAYMQLSRLTSDDSAIYYCARSGYDYGSSYDYHGMDFWGQGTTVTVSSGGGGSGGGGSGGGGSELQMTQSPASLSASVGEPVTFTCRASENIYSYLAWYQQKQGKSPQLLIYGATNLADGMSSRFSGSGSGRQYSLKISSLHPDDVATYYCQNVLSTPYTFGGGTKLEIK

SEQ ID NO: 1495 - DNA, 744 bp, Mus sp.
  source 1..744: mol_type = genomic DNA
gaggtgcagctgctcgagcagtctggagctgagctggttaggcctgggacttcagtgaagatgtcctgcaaggctgctggatacaccttcactaagtactggataggttgggtaaagcagaggcctggacatggccttgagtggattggagatattcaccctggaggtggttatgctaactacaatgagaagttcaagggcaaggccacactgactgcagacacatcctccagcacagcctacatgcagctcagcagactgacatctgatgactccgccatctattactgtgcaagatcggggtatgactacggtagtagttacgattaccatggtatggacttctggggccaagggaccacggtcaccgtctcctcaggtggtggtggttctggcggcggcggctccggtggtggtggttctgagctccagatgacccagtctccagcctccctatctgcatctgtgggagaacctgtcaccttcacatgtcgagcaagtgagaatatttacagttatttagcatggtatcagcagaaacagggaaaatctcctcagctcctgatctatggtgcaaccaacttggcagatggcatgtcatcgaggttcagtggcagtggatctggtagacagtattctctcaagatcagtagcctgcatcctgacgatgttgcaacgtattactgtcaaaatgtgttaagtactccgtacacgttcggaggggggaccaagcttgagatcaaa

SEQ ID NO: 1496 - protein, 503 aa, Mus sp.
EVQLLEQSGAELVRPGTSVKMSCKAAGYTFTKYWIGWVKQRPGHGLEWIGDIHPGGGYANYNEKFKGKATLTADTSSSTAYMQLSRLTSDDSAIYYCARSGYDYGSSYDYHGMDFWGQGTTVTVSSGGGGSGGGGSGGGGSELQMTQSPASLSASVGEPVTFTCRASENIYSYLAWYQQKQGKSPQLLIYGATNLADGMSSRFSGSGSGRQYSLKISSLHPDDVATYYCQNVLSTPYTFGGGTKLEIKSGGGGSEVQLVESGGGLVQPGGSLKLSCAASGFTFNKYAMNWVRQAPGKGLEWVARIRSKYNNYATYYADSVKDRFTISRDDSKNTAYLQMNNLKTEDTAVYYCVRHGNFGNSYISYWAYWGQGTLVTVSSGGGGSGGGGSGGGGSQTVVTQEPSLTVSPGGTVTLTCGSSTGAVTSGNYPNWVQQKPGQAPRGLIGGTKFLAPGTPARFSGSLLGGKAALTLSGVQPEDEAEYYCVLWYSNRWVFGGGTKLTVL

SEQ ID NO: 1497 - DNA, 1509 bp, Mus sp.
  source 1..1509: mol_type = genomic DNA
gaggtgcagctgctcgagcagtctggagctgagctggttaggcctgggacttcagtgaagatgtcctgcaaggctgctggatacaccttcactaagtactggataggttgggtaaagcagaggcctggacatggccttgagtggattggagatattcaccctggaggtggttatgctaactacaatgagaagttcaagggcaaggccacactgactgcagacacatcctccagcacagcctacatgcagctcagcagactgacatctgatgactccgccatctattactgtgcaagatcggggtatgactacggtagtagttacgattaccatggtatggacttctggggccaagggaccacggtcaccgtctcctcaggtggtggtggttctggcggcggcggctccggtggtggtggttctgagctccagatgacccagtctccagcctccctatctgcatctgtgggagaacctgtcaccttcacatgtcgagcaagtgagaatatttacagttatttagcatggtatcagcagaaacagggaaaatctcctcagctcctgatctatggtgcaaccaacttggcagatggcatgtcatcgaggttcagtggcagtggatctggtagacagtattctctcaagatcagtagcctgcatcctgacgatgttgcaacgtattactgtcaaaatgtgttaagtactccgtacacgttcggaggggggaccaagcttgagatcaaatccggaggtggtggatccgaggtgcagctggtcgagtctggaggaggattggtgcagcctggagggtcattgaaactctcatgtgcagcctctggattcaccttcaataagtacgccatgaactgggtccgccaggctccaggaaagggtttggaatgggttgctcgcataagaagtaaatataataattatgcaacatattatgccgattcagtgaaagacaggttcaccatctccagagatgattcaaaaaacactgcctatctacaaatgaacaacttgaaaactgaggacactgccgtgtactactgtgtgagacatgggaacttcggtaatagctacatatcctactgggcttactggggccaagggactctggtcaccgtctcctcaggtggtggtggttctggcggcggcggctccggtggtggtggttctcagactgttgtgactcaggaaccttcactcaccgtatcacctggtggaacagtcacactcacttgtggctcctcgactggggctgttacatctggcaactacccaaactgggtccaacaaaaaccaggtcaggcaccccgtggtctaataggtgggactaagttcctcgcccccggtactcctgccagattctcaggctccctgcttggaggcaaggctgccctcaccctctcaggggtacagccagaggatgaggcagaatattactgtgttctatggtacagcaaccgctgggtgttcggtggaggaaccaaactgactgtccta

SEQ ID NO: 1498 - protein, 127 aa, Mus sp.
EVQLLEQSGAELVRPGTSVKISCKATGYTFSNYWISWVKYRPGHGLEWIGDIYPGGSYTNYNEKFKGKVTLTADTSSRTAYMQLSGLTFEDSAIYYCARSGYDYGSDYDYHGMDYWGQGTTVTVSSG

SEQ ID NO: 1499 - protein, 5 aa, Mus sp.
NYWIS

SEQ ID NO: 1500 - protein, 17 aa, Mus sp.
DIYPGGSYTNYNEKFKG

SEQ ID NO: 1501 - protein, 16 aa, Mus sp.
SGYDYGSDYDYHGMDY

SEQ ID NO: 1502 - DNA, 378 bp, Mus sp.
  source 1..378: mol_type = genomic DNA
gaggtgcagctgctcgagcagtctggagctgagctggtaaggcctgggacttcagtgaagatttcctgcaaggctactgggtacaccttcagtaattactggataagttgggtaaagtataggcctggacatggtcttgagtggattggagatatttaccctggaggcagttatactaattacaatgagaaattcaagggcaaggtcacactgactgcagacacatcctccaggacagcctacatgcagctcagcggcctgacatttgaggactctgccatctactactgtgcaagatcggggtatgactacggtagtgactacgattaccatggtatggactactggggccaagggaccacggtcaccgtctcctca

SEQ ID NO: 1503 - protein, 107 aa, Mus sp.
ELQMTQSPASLSASVGETVTITCRASENIYSNLAWYQQKQGKSPQLLVYAATNLADGVPSRFSGSRSGSDYSLTISSLESEDFVDYYCLQYASYPYTFGGGTKLEIK

SEQ ID NO: 1504 - protein, 11 aa, Mus sp.
RASENIYSNLA

SEQ ID NO: 1505 - protein, 7 aa, Mus sp.
AATNLAD

SEQ ID NO: 1506 - protein, 9 aa, Mus sp.
LQYASYPYT

SEQ ID NO: 1507 - DNA, 321 bp, Mus sp.
  source 1..321: mol_type = genomic DNA
gagctccagatgacccagtctccagcctccctatctgcatctgtgggagaaactgtcaccatcacatgtcgagcaagtgagaatatttacagtaatttagcatggtatcagcagaaacagggaaaatctcctcagctcctggtctatgctgcaacaaacttagcagatggtgtgccatcaaggttcagtggcagtaggtctgggtcagattattctctcaccatcagcagccttgagtctgaagattttgtagactattactgtctacaatatgctagttatccgtacacgttcggaggggggaccaagcttgagatcaaa

SEQ ID NO: 1508 - protein, 248 aa, Mus sp.
EVQLLEQSGAELVRPGTSVKISCKATGYTFSNYWISWVKYRPGHGLEWIGDIYPGGSYTNYNEKFKGKVTLTADTSSRTAYMQLSGLTFEDSAIYYCARSGYDYGSDYDYHGMDYWGQGTTVTVSSGGGGSGGGGSGGGGSELQMTQSPASLSASVGETVTITCRASENIYSNLAWYQQKQGKSPQLLVYAATNLADGVPSRFSGSRSGSDYSLTISSLESEDFVDYYCLQYASYPYTFGGGTKLEIK

SEQ ID NO: 1509 - DNA, 744 bp, Mus sp.
  source 1..744: mol_type = genomic DNA
gaggtgcagctgctcgagcagtctggagctgagctggtaaggcctgggacttcagtgaagatttcctgcaaggctactgggtacaccttcagtaattactggataagttgggtaaagtataggcctggacatggtcttgagtggattggagatatttaccctggaggcagttatactaattacaatgagaaattcaagggcaaggtcacactgactgcagacacatcctccaggacagcctacatgcagctcagcggcctgacatttgaggactctgccatctactactgtgcaagatcggggtatgactacggtagtgactacgattaccatggtatggactactggggccaagggaccacggtcaccgtctcctcaggtggtggtggttctggcggcggcggctccggtggtggtggttctgagctccagatgacccagtctccagcctccctatctgcatctgtgggagaaactgtcaccatcacatgtcgagcaagtgagaatatttacagtaatttagcatggtatcagcagaaacagggaaaatctcctcagctcctggtctatgctgcaacaaacttagcagatggtgtgccatcaaggttcagtggcagtaggtctgggtcagattattctctcaccatcagcagccttgagtctgaagattttgtagactattactgtctacaatatgctagttatccgtacacgttcggaggggggaccaagcttgagatcaaa

SEQ ID NO: 1510 - protein, 503 aa, Mus sp.
EVQLLEQSGAELVRPGTSVKISCKATGYTFSNYWISWVKYRPGHGLEWIGDIYPGGSYTNYNEKFKGKVTLTADTSSRTAYMQLSGLTFEDSAIYYCARSGYDYGSDYDYHGMDYWGQGTTVTVSSGGGGSGGGGSGGGGSELQMTQSPASLSASVGETVTITCRASENIYSNLAWYQQKQGKSPQLLVYAATNLADGVPSRFSGSRSGSDYSLTISSLESEDFVDYYCLQYASYPYTFGGGTKLEIKSGGGGSEVQLVESGGGLVQPGGSLKLSCAASGFTFNKYAMNWVRQAPGKGLEWVARIRSKYNNYATYYADSVKDRFTISRDDSKNTAYLQMNNLKTEDTAVYYCVRHGNFGNSYISYWAYWGQGTLVTVSSGGGGSGGGGSGGGGSQTVVTQEPSLTVSPGGTVTLTCGSSTGAVTSGNYPNWVQQKPGQAPRGLIGGTKFLAPGTPARFSGSLLGGKAALTLSGVQPEDEAEYYCVLWYSNRWVFGGGTKLTVL

SEQ ID NO: 1511 - DNA, 1509 bp, Mus sp.
  source 1..1509: mol_type = genomic DNA
gaggtgcagctgctcgagcagtctggagctgagctggtaaggcctgggacttcagtgaagatttcctgcaaggctactgggtacaccttcagtaattactggataagttgggtaaagtataggcctggacatggtcttgagtggattggagatatttaccctggaggcagttatactaattacaatgagaaattcaagggcaaggtcacactgactgcagacacatcctccaggacagcctacatgcagctcagcggcctgacatttgaggactctgccatctactactgtgcaagatcggggtatgactacggtagtgactacgattaccatggtatggactactggggccaagggaccacggtcaccgtctcctcaggtggtggtggttctggcggcggcggctccggtggtggtggttctgagctccagatgacccagtctccagcctccctatctgcatctgtgggagaaactgtcaccatcacatgtcgagcaagtgagaatatttacagtaatttagcatggtatcagcagaaacagggaaaatctcctcagctcctggtctatgctgcaacaaacttagcagatggtgtgccatcaaggttcagtggcagtaggtctgggtcagattattctctcaccatcagcagccttgagtctgaagattttgtagactattactgtctacaatatgctagttatccgtacacgttcggaggggggaccaagcttgagatcaaatccggaggtggtggatccgaggtgcagctggtcgagtctggaggaggattggtgcagcctggagggtcattgaaactctcatgtgcagcctctggattcaccttcaataagtacgccatgaactgggtccgccaggctccaggaaagggtttggaatgggttgctcgcataagaagtaaatataataattatgcaacatattatgccgattcagtgaaagacaggttcaccatctccagagatgattcaaaaaacactgcctatctacaaatgaacaacttgaaaactgaggacactgccgtgtactactgtgtgagacatgggaacttcggtaatagctacatatcctactgggcttactggggccaagggactctggtcaccgtctcctcaggtggtggtggttctggcggcggcggctccggtggtggtggttctcagactgttgtgactcaggaaccttcactcaccgtatcacctggtggaacagtcacactcacttgtggctcctcgactggggctgttacatctggcaactacccaaactgggtccaacaaaaaccaggtcaggcaccccgtggtctaataggtgggactaagttcctcgcccccggtactcctgccagattctcaggctccctgcttggaggcaaggctgccctcaccctctcaggggtacagccagaggatgaggcagaatattactgtgttctatggtacagcaaccgctgggtgttcggtggaggaaccaaactgactgtccta

SEQ ID NO: 1512 - protein, 119 aa, Mus sp.
EVQLLEQSGAELVRPGTSVKVSCKASGYAFTHYLIEWVKQRPGQGLEWIGMINPENTDTTYNEKFRDKAILTVDKSSNTAYMQLSSLTSDDSAVYFCARQEITSDFDFWGQGTTVTVSS

SEQ ID NO: 1513 - protein, 5 aa, Mus sp.
HYLIE

SEQ ID NO: 1514 - protein, 17 aa, Mus sp.
MINPENTDTTYNEKFRD

SEQ ID NO: 1515 - protein, 9 aa, Mus sp.
QEITSDFDF

SEQ ID NO: 1516 - DNA, 357 bp, Mus sp.
  source 1..357: mol_type = genomic DNA
gaggtgcagctgctcgagcagtctggagctgagctggtaaggcctgggacttcagtgaaggtgtcctgcaaggcttctggatacgccttcactcattacttaatagagtgggtgaagcagaggcctggacagggccttgagtggattggaatgattaatcctgaaaatactgatactacctacaatgagaagttcagggacaaggcaatactgactgtagacaaatcctccaacactgcctacatgcagctcagcagcctgacttctgatgactctgcggtctatttctgtgcaagacaggagattacgtcggactttgacttctggggccaagggaccacggtcaccgtctcctca

SEQ ID NO: 1517 - protein, 108 aa, Mus sp.
ELVLTQSPTTMAASPGEKITITCSASSSISSNYLHWYQQKPGFSPKLLIYRTSNLASGVPARFSGSGSGTSYSLTIGTMEAEDVATYYCQQGSSIPYTFGGGTKLEIK

SEQ ID NO: 1518 - protein, 12 aa, Mus sp.
SASSSISSNYLH

SEQ ID NO: 1519 - protein, 7 aa, Mus sp.
RTSNLAS

SEQ ID NO: 1520 - protein, 9 aa, Mus sp.
QQGSSIPYT

SEQ ID NO: 1521 - DNA, 324 bp, Mus sp.
  source 1..324: mol_type = genomic DNA
gagctcgtgctcacccagtctccaaccaccatggctgcatctcccggggagaagatcactatcacctgcagtgccagctcaagtataagttccaattacttgcattggtatcagcagaagccaggattctcccctaaactcttgatttataggacatccaatctggcttctggagtcccagctcgcttcagtggcagtgggtctgggacctcttactctctcacaattggcaccatggaggctgaagatgttgccacttactactgccagcagggtagtagtataccgtacacgttcggaggggggaccaagcttgagatcaaa

SEQ ID NO: 1522 - protein, 242 aa, Mus sp.
EVQLLEQSGAELVRPGTSVKVSCKASGYAFTHYLIEWVKQRPGQGLEWIGMINPENTDTTYNEKFRDKAILTVDKSSNTAYMQLSSLTSDDSAVYFCARQEITSDFDFWGQGTTVTVSSGGGGSGGGGSGGGGSELVLTQSPTTMAASPGEKITITCSASSSISSNYLHWYQQKPGFSPKLLIYRTSNLASGVPARFSGSGSGTSYSLTIGTMEAEDVATYYCQQGSSIPYTFGGGTKLEIK

SEQ ID NO: 1523 - DNA, 726 bp, Mus sp.
  source 1..726: mol_type = genomic DNA
gaggtgcagctgctcgagcagtctggagctgagctggtaaggcctgggacttcagtgaaggtgtcctgcaaggcttctggatacgccttcactcattacttaatagagtgggtgaagcagaggcctggacagggccttgagtggattggaatgattaatcctgaaaatactgatactacctacaatgagaagttcagggacaaggcaatactgactgtagacaaatcctccaacactgcctacatgcagctcagcagcctgacttctgatgactctgcggtctatttctgtgcaagacaggagattacgtcggactttgacttctggggccaagggaccacggtcaccgtctcctcaggtggtggtggttctggcggcggcggctccggtggtggtggttctgagctcgtgctcacccagtctccaaccaccatggctgcatctcccggggagaagatcactatcacctgcagtgccagctcaagtataagttccaattacttgcattggtatcagcagaagccaggattctcccctaaactcttgatttataggacatccaatctggcttctggagtcccagctcgcttcagtggcagtgggtctgggacctcttactctctcacaattggcaccatggaggctgaagatgttgccacttactactgccagcagggtagtagtataccgtacacgttcggaggggggaccaagcttgagatcaaa

SEQ ID NO: 1524 - protein, 497 aa, Mus sp.
EVQLLEQSGAELVRPGTSVKVSCKASGYAFTHYLIEWVKQRPGQGLEWIGMINPENTDTTYNEKFRDKAILTVDKSSNTAYMQLSSLTSDDSAVYFCARQEITSDFDFWGQGTTVTVSSGGGGSGGGGSGGGGSELVLTQSPTTMAASPGEKITITCSASSSISSNYLHWYQQKPGFSPKLLIYRTSNLASGVPARFSGSGSGTSYSLTIGTMEAEDVATYYCQQGSSIPYTFGGGTKLEIKSGGGGSEVQLVESGGGLVQPGGSLKLSCAASGFTFNKYAMNWVRQAPGKGLEWVARIRSKYNNYATYYADSVKDRFTISRDDSKNTAYLQMNNLKTEDTAVYYCVRHGNFGNSYISYWAYWGQGTLVTVSSGGGGSGGGGSGGGGSQTVVTQEPSLTVSPGGTVTLTCGSSTGAVTSGNYPNWVQQKPGQAPRGLIGGTKFLAPGTPARFSGSLLGGKAALTLSGVQPEDEAEYYCVLWYSNRWVFGGGTKLTVL

SEQ ID NO: 1525 - DNA, 1491 bp, Mus sp.
  source 1..1491: mol_type = genomic DNA
gaggtgcagctgctcgagcagtctggagctgagctggtaaggcctgggacttcagtgaaggtgtcctgcaaggcttctggatacgccttcactcattacttaatagagtgggtgaagcagaggcctggacagggccttgagtggattggaatgattaatcctgaaaatactgatactacctacaatgagaagttcagggacaaggcaatactgactgtagacaaatcctccaacactgcctacatgcagctcagcagcctgacttctgatgactctgcggtctatttctgtgcaagacaggagattacgtcggactttgacttctggggccaagggaccacggtcaccgtctcctcaggtggtggtggttctggcggcggcggctccggtggtggtggttctgagctcgtgctcacccagtctccaaccaccatggctgcatctcccggggagaagatcactatcacctgcagtgccagctcaagtataagttccaattacttgcattggtatcagcagaagccaggattctcccctaaactcttgatttataggacatccaatctggcttctggagtcccagctcgcttcagtggcagtgggtctgggacctcttactctctcacaattggcaccatggaggctgaagatgttgccacttactactgccagcagggtagtagtataccgtacacgttcggaggggggaccaagcttgagatcaaatccggaggtggtggatccgaggtgcagctggtcgagtctggaggaggattggtgcagcctggagggtcattgaaactctcatgtgcagcctctggattcaccttcaataagtacgccatgaactgggtccgccaggctccaggaaagggtttggaatgggttgctcgcataagaagtaaatataataattatgcaacatattatgccgattcagtgaaagacaggttcaccatctccagagatgattcaaaaaacactgcctatctacaaatgaacaacttgaaaactgaggacactgccgtgtactactgtgtgagacatgggaacttcggtaatagctacatatcctactgggcttactggggccaagggactctggtcaccgtctcctcaggtggtggtggttctggcggcggcggctccggtggtggtggttctcagactgttgtgactcaggaaccttcactcaccgtatcacctggtggaacagtcacactcacttgtggctcctcgactggggctgttacatctggcaactacccaaactgggtccaacaaaaaccaggtcaggcaccccgtggtctaataggtgggactaagttcctcgcccccggtactcctgccagattctcaggctccctgcttggaggcaaggctgccctcaccctctcaggggtacagccagaggatgaggcagaatattactgtgttctatggtacagcaaccgctgggtgttcggtggaggaaccaaactgactgtccta

SEQ ID NO: 1526 - protein, 126 aa, Mus sp.
EVQLLEQSGAELVRPGTSVKISCKTTGYTFGYYWISWLKQRPGHGLEWIGDIYPGGGYTNYHEKFKGKVTLTADTSSRTAYMQLSSLTFEDSAIYYCARSGYDYGSDYDYHGMDYWGQGTTVTVSS

SEQ ID NO: 1527 - protein, 5 aa, Mus sp.
YYWIS

SEQ ID NO: 1528 - protein, 17 aa, Mus sp.
DIYPGGGYTNYHEKFKG

SEQ ID NO: 1529 - protein, 16 aa, Mus sp.
SGYDYGSDYDYHGMDY

SEQ ID NO: 1530 - DNA, 378 bp, Mus sp.
  source 1..378: mol_type = genomic DNA
gaggtgcagctgctcgagcagtctggagctgagctggttaggcctgggacttcagtgaagatttcctgcaagactactgggtacaccttcggttattactggataagttggttaaagcagaggcctggacatggccttgagtggattggagatatttaccctggaggtggttacactaactaccatgagaaattcaagggcaaggtcacactgactgcagacacatcctccaggacagcctacatgcagctcagcagcctgacatttgaggactctgccatctattactgtgcaagatcgggatatgactacggtagtgactacgattatcatggtatggattactggggccaagggaccacggtcaccgtctcctca

SEQ ID NO: 1531 - protein, 107 aa, Mus sp.
ELVMTQTPSSLSASLGDRVTISCRASQGISNYLNWYQQKPDGSVKLLIYYTSRLHSGVPSRFSGSGSGTDYSLTISNLDQEDIATYFCQQGNTLPWTFGGGTKLEIK

SEQ ID NO: 1532 - protein, 11 aa, Mus sp.
RASQGISNYLN

SEQ ID NO: 1533 - protein, 7 aa, Mus sp.
YTSRLHS

SEQ ID NO: 1534 - protein, 7 aa, Mus sp.
QQGNTLP

SEQ ID NO: 1535 - DNA, 321 bp, Mus sp.
  source 1..321: mol_type = genomic DNA
gagctcgtgatgacccagactccatcctccctgtctgcctctctgggagacagagtcaccatcagttgcagggcaagtcagggcattagcaattatttaaactggtatcagcagaaaccagatggatctgttaaactcctgatctactacacatcaagattacactcaggagtcccatcaaggttcagtggcagtgggtctggaacagattattctctcaccattagcaacctggatcaagaagatattgccacttacttttgccaacagggtaatacgcttccgtggacgttcggaggggggaccaagcttgagatcaaa

SEQ ID NO: 1536 - protein, 248 aa, Mus sp.
EVQLLEQSGAELVRPGTSVKISCKTTGYTFGYYWISWLKQRPGHGLEWIGDIYPGGGYTNYHEKFKGKVTLTADTSSRTAYMQLSSLTFEDSAIYYCARSGYDYGSDYDYHGMDYWGQGTTVTVSSGGGGSGGGGSGGGGSELVMTQTPSSLSASLGDRVTISCRASQGISNYLNWYQQKPDGSVKLLIYYTSRLHSGVPSRFSGSGSGTDYSLTISNLDQEDIATYFCQQGNTLPWTFGGGTKLEIK

SEQ ID NO: 1537 - DNA, 744 bp, Mus sp.
  source 1..744: mol_type = genomic DNA
gaggtgcagctgctcgagcagtctggagctgagctggttaggcctgggacttcagtgaagatttcctgcaagactactgggtacaccttcggttattactggataagttggttaaagcagaggcctggacatggccttgagtggattggagatatttaccctggaggtggttacactaactaccatgagaaattcaagggcaaggtcacactgactgcagacacatcctccaggacagcctacatgcagctcagcagcctgacatttgaggactctgccatctattactgtgcaagatcgggatatgactacggtagtgactacgattatcatggtatggattactggggccaagggaccacggtcaccgtctcctcaggtggtggtggttctggcggcggcggctccggtggtggtggttctgagctcgtgatgacccagactccatcctccctgtctgcctctctgggagacagagtcaccatcagttgcagggcaagtcagggcattagcaattatttaaactggtatcagcagaaaccagatggatctgttaaactcctgatctactacacatcaagattacactcaggagtcccatcaaggttcagtggcagtgggtctggaacagattattctctcaccattagcaacctggatcaagaagatattgccacttacttttgccaacagggtaatacgcttccgtggacgttcggaggggggaccaagcttgagatcaaa

SEQ ID NO: 1538 - protein, 503 aa, Mus sp.
EVQLLEQSGAELVRPGTSVKISCKTTGYTFGYYWISWLKQRPGHGLEWIGDIYPGGGYTNYHEKFKGKVTLTADTSSRTAYMQLSSLTFEDSAIYYCARSGYDYGSDYDYHGMDYWGQGTTVTVSSGGGGSGGGGSGGGGSELVMTQTPSSLSASLGDRVTISCRASQGISNYLNWYQQKPDGSVKLLIYYTSRLHSGVPSRFSGSGSGTDYSLTISNLDQEDIATYFCQQGNTLPWTFGGGTKLEIKSGGGGSEVQLVESGGGLVQPGGSLKLSCAASGFTFNKYAMNWVRQAPGKGLEWVARIRSKYNNYATYYADSVKDRFTISRDDSKNTAYLQMNNLKTEDTAVYYCVRHGNFGNSYISYWAYWGQGTLVTVSSGGGGSGGGGSGGGGSQTVVTQEPSLTVSPGGTVTLTCGSSTGAVTSGNYPNWVQQKPGQAPRGLIGGTKFLAPGTPARFSGSLLGGKAALTLSGVQPEDEAEYYCVLWYSNRWVFGGGTKLTVL

SEQ ID NO: 1539 - DNA, 1509 bp, Mus sp.
  source 1..1509: mol_type = genomic DNA
gaggtgcagctgctcgagcagtctggagctgagctggttaggcctgggacttcagtgaagatttcctgcaagactactgggtacaccttcggttattactggataagttggttaaagcagaggcctggacatggccttgagtggattggagatatttaccctggaggtggttacactaactaccatgagaaattcaagggcaaggtcacactgactgcagacacatcctccaggacagcctacatgcagctcagcagcctgacatttgaggactctgccatctattactgtgcaagatcgggatatgactacggtagtgactacgattatcatggtatggattactggggccaagggaccacggtcaccgtctcctcaggtggtggtggttctggcggcggcggctccggtggtggtggttctgagctcgtgatgacccagactccatcctccctgtctgcctctctgggagacagagtcaccatcagttgcagggcaagtcagggcattagcaattatttaaactggtatcagcagaaaccagatggatctgttaaactcctgatctactacacatcaagattacactcaggagtcccatcaaggttcagtggcagtgggtctggaacagattattctctcaccattagcaacctggatcaagaagatattgccacttacttttgccaacagggtaatacgcttccgtggacgttcggaggggggaccaagcttgagatcaaatccggaggtggtggatccgaggtgcagctggtcgagtctggaggaggattggtgcagcctggagggtcattgaaactctcatgtgcagcctctggattcaccttcaataagtacgccatgaactgggtccgccaggctccaggaaagggtttggaatgggttgctcgcataagaagtaaatataataattatgcaacatattatgccgattcagtgaaagacaggttcaccatctccagagatgattcaaaaaacactgcctatctacaaatgaacaacttgaaaactgaggacactgccgtgtactactgtgtgagacatgggaacttcggtaatagctacatatcctactgggcttactggggccaagggactctggtcaccgtctcctcaggtggtggtggttctggcggcggcggctccggtggtggtggttctcagactgttgtgactcaggaaccttcactcaccgtatcacctggtggaacagtcacactcacttgtggctcctcgactggggctgttacatctggcaactacccaaactgggtccaacaaaaaccaggtcaggcaccccgtggtctaataggtgggactaagttcctcgcccccggtactcctgccagattctcaggctccctgcttggaggcaaggctgccctcaccctctcaggggtacagccagaggatgaggcagaatattactgtgttctatggtacagcaaccgctgggtgttcggtggaggaaccaaactgactgtccta

SEQ ID NO: 1540 - protein, 126 aa, Mus sp.
EVQLLEQSGAEVVRPGTSVKMSCKAAGYTFTKYWIGWVKQRPGHGLEWIGDIHPGGGFANYNEKFKGKATLTADTSSSTAYMQLSRLTSDDSAIYYCARSGYDYGSSYDYHGMDYWGQGTTVTVSS

SEQ ID NO: 1541 - protein, 5 aa, Mus sp.
KYWIG

SEQ ID NO: 1542 - protein, 17 aa, Mus sp.
DIHPGGGFANYNEKFKG

SEQ ID NO: 1543 - protein, 16 aa, Mus sp.
SGYDYGSSYDYHGMDY

SEQ ID NO: 1544 - DNA, 378 bp, Mus sp.
  source 1..378: mol_type = genomic DNA
gaggtgcagctgctcgagcagtctggagctgaggtggttaggcctgggacttcagtgaagatgtcctgcaaggctgctggatacaccttcactaagtactggataggttgggtaaagcagaggcctggacatggccttgagtggattggagatattcaccctggaggtggttttgctaactacaatgagaagttcaagggcaaggccacactgactgcagacacatcctccagcacagcctacatgcagctcagcagactgacatctgatgactctgccatctattactgtgcaagatcgggttatgactacggtagtagttacgattaccatggtatggactactggggccaagggaccacggtcaccgtctcctca

SEQ ID NO: 1545 - protein, 107 aa, Mus sp.
ELVMTQSPSSLSASLGERVSLTCRASQEISGYLSWLQQKPDGTIKRLIYAASTLDSGVPKRFSGSRSGSDYSLTISSLESEDFADYYCLQYASYPPTFGGGTKLEIK

SEQ ID NO: 1546 - protein, 11 aa, Mus sp.
RASQEISGYLS

SEQ ID NO: 1547 - protein, 7 aa, Mus sp.
AASTLDS

SEQ ID NO: 1548 - protein, 9 aa, Mus sp.
LQYASYPPT

SEQ ID NO: 1549 - DNA, 321 bp, Mus sp.
  source 1..321: mol_type = genomic DNA
gagctcgtgatgacacagtctccatcctccttatctgcctctctgggagaaagagtcagtctcacttgtcgggcaagtcaggaaattagtggttacttaagctggcttcagcagaaaccagatggaactattaaacgcctgatctacgccgcatccactttagattctggtgtcccaaaaaggttcagtggcagtaggtctgggtcagattattctctcaccatcagcagccttgagtctgaagattttgcagactattactgtctacaatatgctagttatcctcccacgttcggaggggggaccaagcttgagatcaaa

SEQ ID NO: 1550 - protein, 248 aa, Mus sp.
EVQLLEQSGAEVVRPGTSVKMSCKAAGYTFTKYWIGWVKQRPGHGLEWIGDIHPGGGFANYNEKFKGKATLTADTSSSTAYMQLSRLTSDDSAIYYCARSGYDYGSSYDYHGMDYWGQGTTVTVSSGGGGSGGGGSGGGGSELVMTQSPSSLSASLGERVSLTCRASQEISGYLSWLQQKPDGTIKRLIYAASTLDSGVPKRFSGSRSGSDYSLTISSLESEDFADYYCLQYASYPPTFGGGTKLEIK

SEQ ID NO: 1551 - DNA, 744 bp, Mus sp.
  source 1..744: mol_type = genomic DNA
gaggtgcagctgctcgagcagtctggagctgaggtggttaggcctgggacttcagtgaagatgtcctgcaaggctgctggatacaccttcactaagtactggataggttgggtaaagcagaggcctggacatggccttgagtggattggagatattcaccctggaggtggttttgctaactacaatgagaagttcaagggcaaggccacactgactgcagacacatcctccagcacagcctacatgcagctcagcagactgacatctgatgactctgccatctattactgtgcaagatcgggttatgactacggtagtagttacgattaccatggtatggactactggggccaagggaccacggtcaccgtctcctcaggtggtggtggttctggcggcggcggctccggtggtggtggttctgagctcgtgatgacacagtctccatcctccttatctgcctctctgggagaaagagtcagtctcacttgtcgggcaagtcaggaaattagtggttacttaagctggcttcagcagaaaccagatggaactattaaacgcctgatctacgccgcatccactttagattctggtgtcccaaaaaggttcagtggcagtaggtctgggtcagattattctctcaccatcagcagccttgagtctgaagattttgcagactattactgtctacaatatgctagttatcctcccacgttcggaggggggaccaagcttgagatcaaa

SEQ ID NO: 1552 - protein, 503 aa, Mus sp.
EVQLLEQSGAEVVRPGTSVKMSCKAAGYTFTKYWIGWVKQRPGHGLEWIGDIHPGGGFANYNEKFKGKATLTADTSSSTAYMQLSRLTSDDSAIYYCARSGYDYGSSYDYHGMDYWGQGTTVTVSSGGGGSGGGGSGGGGSELVMTQSPSSLSASLGERVSLTCRASQEISGYLSWLQQKPDGTIKRLIYAASTLDSGVPKRFSGSRSGSDYSLTISSLESEDFADYYCLQYASYPPTFGGGTKLEIKSGGGGSEVQLVESGGGLVQPGGSLKLSCAASGFTFNKYAMNWVRQAPGKGLEWVARIRSKYNNYATYYADSVKDRFTISRDDSKNTAYLQMNNLKTEDTAVYYCVRHGNFGNSYISYWAYWGQGTLVTVSSGGGGSGGGGSGGGGSQTVVTQEPSLTVSPGGTVTLTCGSSTGAVTSGNYPNWVQQKPGQAPRGLIGGTKFLAPGTPARFSGSLLGGKAALTLSGVQPEDEAEYYCVLWYSNRWVFGGGTKLTVL

SEQ ID NO: 1553 - DNA, 1509 bp, Mus sp.
  source 1..1509: mol_type = genomic DNA
gaggtgcagctgctcgagcagtctggagctgaggtggttaggcctgggacttcagtgaagatgtcctgcaaggctgctggatacaccttcactaagtactggataggttgggtaaagcagaggcctggacatggccttgagtggattggagatattcaccctggaggtggttttgctaactacaatgagaagttcaagggcaaggccacactgactgcagacacatcctccagcacagcctacatgcagctcagcagactgacatctgatgactctgccatctattactgtgcaagatcgggttatgactacggtagtagttacgattaccatggtatggactactggggccaagggaccacggtcaccgtctcctcaggtggtggtggttctggcggcggcggctccggtggtggtggttctgagctcgtgatgacacagtctccatcctccttatctgcctctctgggagaaagagtcagtctcacttgtcgggcaagtcaggaaattagtggttacttaagctggcttcagcagaaaccagatggaactattaaacgcctgatctacgccgcatccactttagattctggtgtcccaaaaaggttcagtggcagtaggtctgggtcagattattctctcaccatcagcagccttgagtctgaagattttgcagactattactgtctacaatatgctagttatcctcccacgttcggaggggggaccaagcttgagatcaaatccggaggtggtggatccgaggtgcagctggtcgagtctggaggaggattggtgcagcctggagggtcattgaaactctcatgtgcagcctctggattcaccttcaataagtacgccatgaactgggtccgccaggctccaggaaagggtttggaatgggttgctcgcataagaagtaaatataataattatgcaacatattatgccgattcagtgaaagacaggttcaccatctccagagatgattcaaaaaacactgcctatctacaaatgaacaacttgaaaactgaggacactgccgtgtactactgtgtgagacatgggaacttcggtaatagctacatatcctactgggcttactggggccaagggactctggtcaccgtctcctcaggtggtggtggttctggcggcggcggctccggtggtggtggttctcagactgttgtgactcaggaaccttcactcaccgtatcacctggtggaacagtcacactcacttgtggctcctcgactggggctgttacatctggcaactacccaaactgggtccaacaaaaaccaggtcaggcaccccgtggtctaataggtgggactaagttcctcgcccccggtactcctgccagattctcaggctccctgcttggaggcaaggctgccctcaccctctcaggggtacagccagaggatgaggcagaatattactgtgttctatggtacagcaaccgctgggtgttcggtggaggaaccaaactgactgtccta

SEQ ID NO: 1554 - protein, 126 aa, Mus sp.
EVQLLEQSGAELVRPGTSVKIPCKATGYTFSYYWIGWVKQRPGHGLEWIGDIYPGGGYSNYNEKFKGKATLTADTSSSTAYMQLSGLTSEDSAIYYCARSGYDYGSDYDYHGLDYWGQGTTVTVSS

SEQ ID NO: 1555 - protein, 5 aa, Mus sp.
YYWIG

SEQ ID NO: 1556 - protein, 17 aa, Mus sp.
DIYPGGGYSNYNEKFKG

SEQ ID NO: 1557 - protein, 16 aa, Mus sp.
SGYDYGSDYDYHGLDY

SEQ ID NO: 1558 - DNA, 378 bp, Mus sp.
  source 1..378: mol_type = genomic DNA
gaggtgcagctgctcgagcagtctggagctgaactggtaaggcctgggacttcagtgaagattccctgcaaggctactggatacaccttcagttattactggataggttgggtaaagcagaggcctggacatggccttgagtggattggagatatttaccctggaggtggttatagtaactacaatgagaaattcaagggaaaggccacactgactgcagacacatcctccagcacagcctacatgcagctcagcggcctgacatctgaggactctgccatctattactgtgcaagatcgggatatgactacggtagtgactacgattaccatggtctggactactggggccaagggaccacggtcaccgtctcctca

SEQ ID NO: 1559 - protein, 111 aa, Mus sp.
ELVLTQSPASLAVSLGQRATISCRASESVEYYGTSLMQWYQQKPGQPPKLLIYAASNVESGVPARFSGSGSGTDFSLNIHPVEEDDIAMYFCQQSRKVPYTFGGGTKLEIK

SEQ ID NO: 1560 - protein, 15 aa, Mus sp.
RASESVEYYGTSLMQ

SEQ ID NO: 1561 - protein, 7 aa, Mus sp.
AASNVES

SEQ ID NO: 1562 - protein, 9 aa, Mus sp.
QQSRKVPYT

SEQ ID NO: 1563 - DNA, 333 bp, Mus sp.
  source 1..333: mol_type = genomic DNA
gagctcgtgctcacccagtctccagcttctttggctgtgtctctagggcagagagccaccatctcctgcagagccagtgaaagtgttgaatattatggcacaagtttaatgcagtggtaccaacagaaaccaggacagccacccaaactcctcatctatgctgcatccaacgtagaatctggggtccctgccaggtttagtggcagtgggtctgggacagacttcagcctcaacatccatcctgtggaggaggatgatattgcaatgtatttctgtcagcaaagtaggaaggttccgtacacgttcggaggggggaccaagcttgagatcaaa

SEQ ID NO: 1564 - protein, 252 aa, Mus sp.
EVQLLEQSGAELVRPGTSVKIPCKATGYTFSYYWIGWVKQRPGHGLEWIGDIYPGGGYSNYNEKFKGKATLTADTSSSTAYMQLSGLTSEDSAIYYCARSGYDYGSDYDYHGLDYWGQGTTVTVSSGGGGSGGGGSGGGGSELVLTQSPASLAVSLGQRATISCRASESVEYYGTSLMQWYQQKPGQPPKLLIYAASNVESGVPARFSGSGSGTDFSLNIHPVEEDDIAMYFCQQSRKVPYTFGGGTKLEIK

SEQ ID NO: 1565 - DNA, 756 bp, Mus sp.
  source 1..756: mol_type = genomic DNA
gaggtgcagctgctcgagcagtctggagctgaactggtaaggcctgggacttcagtgaagattccctgcaaggctactggatacaccttcagttattactggataggttgggtaaagcagaggcctggacatggccttgagtggattggagatatttaccctggaggtggttatagtaactacaatgagaaattcaagggaaaggccacactgactgcagacacatcctccagcacagcctacatgcagctcagcggcctgacatctgaggactctgccatctattactgtgcaagatcgggatatgactacggtagtgactacgattaccatggtctggactactggggccaagggaccacggtcaccgtctcctcaggtggtggtggttctggcggcggcggctccggtggtggtggttctgagctcgtgctcacccagtctccagcttctttggctgtgtctctagggcagagagccaccatctcctgcagagccagtgaaagtgttgaatattatggcacaagtttaatgcagtggtaccaacagaaaccaggacagccacccaaactcctcatctatgctgcatccaacgtagaatctggggtccctgccaggtttagtggcagtgggtctgggacagacttcagcctcaacatccatcctgtggaggaggatgatattgcaatgtatttctgtcagcaaagtaggaaggttccgtacacgttcggaggggggaccaagcttgagatcaaa

SEQ ID NO: 1566 - protein, 507 aa, Mus sp.
EVQLLEQSGAELVRPGTSVKIPCKATGYTFSYYWIGWVKQRPGHGLEWIGDIYPGGGYSNYNEKFKGKATLTADTSSSTAYMQLSGLTSEDSAIYYCARSGYDYGSDYDYHGLDYWGQGTTVTVSSGGGGSGGGGSGGGGSELVLTQSPASLAVSLGQRATISCRASESVEYYGTSLMQWYQQKPGQPPKLLIYAASNVESGVPARFSGSGSGTDFSLNIHPVEEDDIAMYFCQQSRKVPYTFGGGTKLEIKSGGGGSEVQLVESGGGLVQPGGSLKLSCAASGFTFNKYAMNWVRQAPGKGLEWVARIRSKYNNYATYYADSVKDRFTISRDDSKNTAYLQMNNLKTEDTAVYYCVRHGNFGNSYISYWAYWGQGTLVTVSSGGGGSGGGGSGGGGSQTVVTQEPSLTVSPGGTVTLTCGSSTGAVTSGNYPNWVQQKPGQAPRGLIGGTKFLAPGTPARFSGSLLGGKAALTLSGVQPEDEAEYYCVLWYSNRWVFGGGTKLTVL

SEQ ID NO: 1567 - DNA, 1521 bp, Mus sp.
  source 1..1521: mol_type = genomic DNA
gaggtgcagctgctcgagcagtctggagctgaactggtaaggcctgggacttcagtgaagattccctgcaaggctactggatacaccttcagttattactggataggttgggtaaagcagaggcctggacatggccttgagtggattggagatatttaccctggaggtggttatagtaactacaatgagaaattcaagggaaaggccacactgactgcagacacatcctccagcacagcctacatgcagctcagcggcctgacatctgaggactctgccatctattactgtgcaagatcgggatatgactacggtagtgactacgattaccatggtctggactactggggccaagggaccacggtcaccgtctcctcaggtggtggtggttctggcggcggcggctccggtggtggtggttctgagctcgtgctcacccagtctccagcttctttggctgtgtctctagggcagagagccaccatctcctgcagagccagtgaaagtgttgaatattatggcacaagtttaatgcagtggtaccaacagaaaccaggacagccacccaaactcctcatctatgctgcatccaacgtagaatctggggtccctgccaggtttagtggcagtgggtctgggacagacttcagcctcaacatccatcctgtggaggaggatgatattgcaatgtatttctgtcagcaaagtaggaaggttccgtacacgttcggaggggggaccaagcttgagatcaaatccggaggtggtggatccgaggtgcagctggtcgagtctggaggaggattggtgcagcctggagggtcattgaaactctcatgtgcagcctctggattcaccttcaataagtacgccatgaactgggtccgccaggctccaggaaagggtttggaatgggttgctcgcataagaagtaaatataataattatgcaacatattatgccgattcagtgaaagacaggttcaccatctccagagatgattcaaaaaacactgcctatctacaaatgaacaacttgaaaactgaggacactgccgtgtactactgtgtgagacatgggaacttcggtaatagctacatatcctactgggcttactggggccaagggactctggtcaccgtctcctcaggtggtggtggttctggcggcggcggctccggtggtggtggttctcagactgttgtgactcaggaaccttcactcaccgtatcacctggtggaacagtcacactcacttgtggctcctcgactggggctgttacatctggcaactacccaaactgggtccaacaaaaaccaggtcaggcaccccgtggtctaataggtgggactaagttcctcgcccccggtactcctgccagattctcaggctccctgcttggaggcaaggctgccctcaccctctcaggggtacagccagaggatgaggcagaatattactgtgttctatggtacagcaaccgctgggtgttcggtggaggaaccaaactgactgtccta

SEQ ID NO: 1568 - protein, 126 aa, Mus sp.; identical to SEQ ID NO: 1540

SEQ ID NO: 1569 - protein, 5 aa, Mus sp.
KYWIG

SEQ ID NO: 1570 - protein, 17 aa, Mus sp.
DIHPGGGFANYNEKFKG

SEQ ID NO: 1571 - protein, 16 aa, Mus sp.
SGYDYGSSYDYHGMDY

SEQ ID NO: 1572 - DNA, 378 bp, Mus sp.; identical to SEQ ID NO: 1544
  source 1..378: mol_type = genomic DNA

SEQ ID NO: 1573 - protein, 111 aa, Mus sp.
ELQMTQSPTSLAVSLGQRATISCRASQTVYYDGNNYMNWYQHKPGQPPKLLIYATSNLESGIPARFSGSGSGTDFTLNIHPVEAEDAATYYCQQSYEDPYTFGGGTKLEIK

SEQ ID NO: 1574 - protein, 15 aa, Mus sp.
RASQTVYYDGNNYMN

SEQ ID NO: 1575 - protein, 7 aa, Mus sp.
ATSNLES

SEQ ID NO: 1576 - protein, 9 aa, Mus sp.
QQSYEDPYT

SEQ ID NO: 1577 - DNA, 333 bp, Mus sp.
  source 1..333: mol_type = genomic DNA
gagctccagatgacccagtctccaacttctttggctgtgtctctcgggcagagggccaccatctcctgcagggccagccaaactgtttactatgatggtaataattatatgaactggtatcaacacaaaccaggacagccacccaaactcctcatctatgctacatccaatctagaatctgggatcccagccaggtttagtggcagtgggtctgggacagacttcaccctcaacatccatcctgtggaggcggaggatgctgcaacctattactgtcagcaaagttatgaggatccgtacacgttcggaggggggaccaagcttgagatcaaa

SEQ ID NO: 1578 - protein, 252 aa, Mus sp.
EVQLLEQSGAEVVRPGTSVKMSCKAAGYTFTKYWIGWVKQRPGHGLEWIGDIHPGGGFANYNEKFKGKATLTADTSSSTAYMQLSRLTSDDSAIYYCARSGYDYGSSYDYHGMDYWGQGTTVTVSSGGGGSGGGGSGGGGSELQMTQSPTSLAVSLGQRATISCRASQTVYYDGNNYMNWYQHKPGQPPKLLIYATSNLESGIPARFSGSGSGTDFTLNIHPVEAEDAATYYCQQSYEDPYTFGGGTKLEIK

SEQ ID NO: 1579 - DNA, 756 bp, Mus sp.
  source 1..756: mol_type = genomic DNA
gaggtgcagctgctcgagcagtctggagctgaggtggttaggcctgggacttcagtgaagatgtcctgcaaggctgctggatacaccttcactaagtactggataggttgggtaaagcagaggcctggacatggccttgagtggattggagatattcaccctggaggtggttttgctaactacaatgagaagttcaagggcaaggccacactgactgcagacacatcctccagcacagcctacatgcagctcagcagactgacatctgatgactctgccatctattactgtgcaagatcgggttatgactacggtagtagttacgattaccatggtatggactactggggccaagggaccacggtcaccgtctcctcaggtggtggtggttctggcggcggcggctccggtggtggtggttctgagctccagatgacccagtctccaacttctttggctgtgtctctcgggcagagggccaccatctcctgcagggccagccaaactgtttactatgatggtaataattatatgaactggtatcaacacaaaccaggacagccacccaaactcctcatctatgctacatccaatctagaatctgggatcccagccaggtttagtggcagtgggtctgggacagacttcaccctcaacatccatcctgtggaggcggaggatgctgcaacctattactgtcagcaaagttatgaggatccgtacacgttcggaggggggaccaagcttgagatcaaa

SEQ ID NO: 1580 - protein, 507 aa, Mus sp.
EVQLLEQSGAEVVRPGTSVKMSCKAAGYTFTKYWIGWVKQRPGHGLEWIGDIHPGGGFANYNEKFKGKATLTADTSSSTAYMQLSRLTSDDSAIYYCARSGYDYGSSYDYHGMDYWGQGTTVTVSSGGGGSGGGGSGGGGSELQMTQSPTSLAVSLGQRATISCRASQTVYYDGNNYMNWYQHKPGQPPKLLIYATSNLESGIPARFSGSGSGTDFTLNIHPVEAEDAATYYCQQSYEDPYTFGGGTKLEIKSGGGGSEVQLVESGGGLVQPGGSLKLSCAASGFTFNKYAMNWVRQAPGKGLEWVARIRSKYNNYATYYADSVKDRFTISRDDSKNTAYLQMNNLKTEDTAVYYCVRHGNFGNSYISYWAYWGQGTLVTVSSGGGGSGGGGSGGGGSQTVVTQEPSLTVSPGGTVTLTCGSSTGAVTSGNYPNWVQQKPGQAPRGLIGGTKFLAPGTPARFSGSLLGGKAALTLSGVQPEDEAEYYCVLWYSNRWVFGGGTKLTVL

SEQ ID NO: 1581 - DNA, 1521 bp, Mus sp.
  source 1..1521: mol_type = genomic DNA
gaggtgcagctgctcgagcagtctggagctgaggtggttaggcctgggacttcagtgaagatgtcctgcaaggctgctggatacaccttcactaagtactggataggttgggtaaagcagaggcctggacatggccttgagtggattggagatattcaccctggaggtggttttgctaactacaatgagaagttcaagggcaaggccacactgactgcagacacatcctccagcacagcctacatgcagctcagcagactgacatctgatgactctgccatctattactgtgcaagatcgggttatgactacggtagtagttacgattaccatggtatggactactggggccaagggaccacggtcaccgtctcctcaggtggtggtggttctggcggcggcggctccggtggtggtggttctgagctccagatgacccagtctccaacttctttggctgtgtctctcgggcagagggccaccatctcctgcagggccagccaaactgtttactatgatggtaataattatatgaactggtatcaacacaaaccaggacagccacccaaactcctcatctatgctacatccaatctagaatctgggatcccagccaggtttagtggcagtgggtctgggacagacttcaccctcaacatccatcctgtggaggcggaggatgctgcaacctattactgtcagcaaagttatgaggatccgtacacgttcggaggggggaccaagcttgagatcaaatccggaggtggtggatccgaggtgcagctggtcgagtctggaggaggattggtgcagcctggagggtcattgaaactctcatgtgcagcctctggattcaccttcaataagtacgccatgaactgggtccgccaggctccaggaaagggtttggaatgggttgctcgcataagaagtaaatataataattatgcaacatattatgccgattcagtgaaagacaggttcaccatctccagagatgattcaaaaaacactgcctatctacaaatgaacaacttgaaaactgaggacactgccgtgtactactgtgtgagacatgggaacttcggtaatagctacatatcctactgggcttactggggccaagggactctggtcaccgtctcctcaggtggtggtggttctggcggcggcggctccggtggtggtggttctcagactgttgtgactcaggaaccttcactcaccgtatcacctggtggaacagtcacactcacttgtggctcctcgactggggctgttacatctggcaactacccaaactgggtccaacaaaaaccaggtcaggcaccccgtggtctaataggtgggactaagttcctcgcccccggtactcctgccagattctcaggctccctgcttggaggcaaggctgccctcaccctctcaggggtacagccagaggatgaggcagaatattactgtgttctatggtacagcaaccgctgggtgttcggtggaggaaccaaactgactgtccta

SEQ ID NO: 1582 - protein, 126 aa, Mus sp.
EVQLLEQSGAELVRPGTSVKISCKATGYTFTTYWLGWVKQRPGHGLEWIGEIHPGGGYTNYNEKFKGKATLTADTSSSTAYMQLSRLTSDDSAIYYCARSGYDYGSSYDYYGMDYWGQGTTVTVSS

SEQ ID NO: 1583 - protein, 5 aa, Mus sp.
TYWLG

SEQ ID NO: 1584 - protein, 17 aa, Mus sp.
EIHPGGGYTNYNEKFKG

SEQ ID NO: 1585 - protein, 16 aa, Mus sp.
SGYDYGSSYDYYGMDY

SEQ ID NO: 1586 - DNA, 378 bp, Mus sp.
  source 1..378: mol_type = genomic DNA
gaggtgcagctgctcgagcagtctggagctgaactggtaaggcctgggacctcagtgaagatttcctgcaaggctactggatacaccttcactacttactggctaggttgggtaaagcagaggcctggacatggccttgagtggattggagagattcaccctggaggtggttatactaactacaatgagaagttcaagggcaaggccacactgactgcagacacatcctccagcacagcctacatgcagctcagcagactgacatctgatgactccgccatctattactgtgcaagatcggggtatgactacggtagtagttacgattactatggtatggactactggggccaagggaccacggtcaccgtctcctca

SEQ ID NO: 1587 - protein, 107 aa, Mus sp.
ELVMTQSPSSLSASLGERVSLTCRASQDIGSSLNWLQQEPDGTIKRLIYATSSLDSGVPKRFSGSRSGSDYSLTISSLESEDFVDYYCLQYASSPYTFGGGTKLEIK

SEQ ID NO: 1588 - protein, 11 aa, Mus sp.
RASQDIGSSLN

SEQ ID NO: 1589 - protein, 7 aa, Mus sp.
ATSSLDS

SEQ ID NO: 1590 - protein, 9 aa, Mus sp.
LQYASSPYT

SEQ ID NO: 1591 - DNA, 321 bp, Mus sp.
  source 1..321: mol_type = genomic DNA
gagctcgtcatgacccagtctccatcctccttatctgcctctctgggagaaagagtcagtctcacttgtcgggcaagtcaggacattggtagtagcttaaactggcttcagcaggaaccagatggaactattaaacgcctgatctacgccacatccagtttagattctggtgtccccaaaaggttcagtggcagtaggtctgggtcagattattctctcaccatcagcagccttgagtctgaagattttgtagactattactgtctacaatatgctagttctccgtacacgttcggaggggggaccaagcttgagatcaaa

SEQ ID NO: 1592 - protein, 248 aa, Mus sp.
EVQLLEQSGAELVRPGTSVKISCKATGYTFTTYWLGWVKQRPGHGLEWIGEIHPGGGYTNYNEKFKGKATLTADTSSSTAYMQLSRLTSDDSAIYYCARSGYDYGSSYDYYGMDYWGQGTTVTVSSGGGGSGGGGSGGGGSELVMTQSPSSLSASLGERVSLTCRASQDIGSSLNWLQQEPDGTIKRLIYATSSLDSGVPKRFSGSRSGSDYSLTISSLESEDFVDYYCLQYASSPYTFGGGTKLEIK

SEQ ID NO: 1593 - DNA, 744 bp, Mus sp.
  source 1..744: mol_type = genomic DNA
gaggtgcagctgctcgagcagtctggagctgaactggtaaggcctgggacctcagtgaagatttcctgcaaggctactggatacaccttcactacttactggctaggttgggtaaagcagaggcctggacatggccttgagtggattggagagattcaccctggaggtggttatactaactacaatgagaagttcaagggcaaggccacactgactgcagacacatcctccagcacagcctacatgcagctcagcagactgacatctgatgactccgccatctattactgtgcaagatcggggtatgactacggtagtagttacgattactatggtatggactactggggccaagggaccacggtcaccgtctcctcaggtggtggtggttctggcggcggcggctccggtggtggtggttctgagctcgtcatgacccagtctccatcctccttatctgcctctctgggagaaagagtcagtctcacttgtcgggcaagtcaggacattggtagtagcttaaactggcttcagcaggaaccagatggaactattaaacgcctgatctacgccacatccagtttagattctggtgtccccaaaaggttcagtggcagtaggtctgggtcagattattctctcaccatcagcagccttgagtctgaagattttgtagactattactgtctacaatatgctagttctccgtacacgttcggaggggggaccaagcttgagatcaaa

SEQ ID NO: 1594 - protein, 503 aa, Mus sp.
EVQLLEQSGAELVRPGTSVKISCKATGYTFTTYWLGWVKQRPGHGLEWIGEIHPGGGYTNYNEKFKGKATLTADTSSSTAYMQLSRLTSDDSAIYYCARSGYDYGSSYDYYGMDYWGQGTTVTVSSGGGGSGGGGSGGGGSELVMTQSPSSLSASLGERVSLTCRASQDIGSSLNWLQQEPDGTIKRLIYATSSLDSGVPKRFSGSRSGSDYSLTISSLESEDFVDYYCLQYASSPYTFGGGTKLEIKSGGGGSEVQLVESGGGLVQPGGSLKLSCAASGFTFNKYAMNWVRQAPGKGLEWVARIRSKYNNYATYYADSVKDRFTISRDDSKNTAYLQMNNLKTEDTAVYYCVRHGNFGNSYISYWAYWGQGTLVTVSSGGGGSGGGGSGGGGSQTVVTQEPSLTVSPGGTVTLTCGSSTGAVTSGNYPNWVQQKPGQAPRGLIGGTKFLAPGTPARFSGSLLGGKAALTLSGVQPEDEAEYYCVLWYSNRWVFGGGTKLTVL

SEQ ID NO: 1595 - DNA, 1509 bp, Mus sp.
  source 1..1509: mol_type = genomic DNA
gaggtgcagctgctcgagcagtctggagctgaactggtaaggcctgggacctcagtgaagatttcctgcaaggctactggatacaccttcactacttactggctaggttgggtaaagcagaggcctggacatggccttgagtggattggagagattcaccctggaggtggttatactaactacaatgagaagttcaagggcaaggccacactgactgcagacacatcctccagcacagcctacatgcagctcagcagactgacatctgatgactccgccatctattactgtgcaagatcggggtatgactacggtagtagttacgattactatggtatggactactggggccaagggaccacggtcaccgtctcctcaggtggtggtggttctggcggcggcggctccggtggtggtggttctgagctcgtcatgacccagtctccatcctccttatctgcctctctgggagaaagagtcagtctcacttgtcgggcaagtcaggacattggtagtagcttaaactggcttcagcaggaaccagatggaactattaaacgcctgatctacgccacatccagtttagattctggtgtccccaaaaggttcagtggcagtaggtctgggtcagattattctctcaccatcagcagccttgagtctgaagattttgtagactattactgtctacaatatgctagttctccgtacacgttcggaggggggaccaagcttgagatcaaatccggaggtggtggatccgaggtgcagctggtcgagtctggaggaggattggtgcagcctggagggtcattgaaactctcatgtgcagcctctggattcaccttcaataagtacgccatgaactgggtccgccaggctccaggaaagggtttggaatgggttgctcgcataagaagtaaatataataattatgcaacatattatgccgattcagtgaaagacaggttcaccatctccagagatgattcaaaaaacactgcctatctacaaatgaacaacttgaaaactgaggacactgccgtgtactactgtgtgagacatgggaacttcggtaatagctacatatcctactgggcttactggggccaagggactctggtcaccgtctcctcaggtggtggtggttctggcggcggcggctccggtggtggtggttctcagactgttgtgactcaggaaccttcactcaccgtatcacctggtggaacagtcacactcacttgtggctcctcgactggggctgttacatctggcaactacccaaactgggtccaacaaaaaccaggtcaggcaccccgtggtctaataggtgggactaagttcctcgcccccggtactcctgccagattctcaggctccctgcttggaggcaaggctgccctcaccctctcaggggtacagccagaggatgaggcagaatattactgtgttctatggtacagcaaccgctgggtgttcggtggaggaaccaaactgactgtccta

SEQ ID NO: 1596 - protein, 126 aa, Mus sp.; identical to SEQ ID NO: 1540

SEQ ID NO: 1597 - protein, 5 aa, Mus sp.
KYWIG

SEQ ID NO: 1598 - protein, 17 aa, Mus sp.
DIHPGGGFANYNEKFKG

SEQ ID NO: 1599 - protein, 16 aa, Mus sp.
SGYDYGSSYDYHGMDY

SEQ ID NO: 1600 - DNA, 378 bp, Mus sp.; identical to SEQ ID NO: 1544
  source 1..378: mol_type = genomic DNA

SEQ ID NO: 1601 - protein, 113 aa, Mus sp.
ELVMTQSPSSLTVTAGEKVTMSCKSSQSLLNSGNQKNYLAWYQQKPGQPPKLLIYGASTRESGVPDRFTGSGSGTDFTLTISSVQAEDLADYFCQQHYSTPYTFGGGTKLEIK

SEQ ID NO: 1602 - protein, 17 aa, Mus sp.
KSSQSLLNSGNQKNYLA

SEQ ID NO: 1603 - protein, 7 aa, Mus sp.
GASTRES

SEQ ID NO: 1604 - protein, 9 aa, Mus sp.
QQHYSTPYT

SEQ ID NO: 1605 - DNA, 339 bp, Mus sp.
  source 1..339: mol_type = genomic DNA
gagctcgtgatgacacagtctccatcctccctgactgtgacagcaggagagaaggtcactatgagctgcaagtccagtcagagtctgttaaacagtggaaatcaaaagaactacttggcctggtaccagcagaaaccagggcagcctcctaaactgttgatctacggggcatccactagggaatctggagtccctgatcgcttcacaggcagtggatctgggacagatttcactcttaccatcagcagtgtgcaggctgaagacctggcagattacttctgtcagcaacattatagcactccgtacacgttcggaggggggaccaagcttgagatcaaa

SEQ ID NO: 1606 - protein, 254 aa, Mus sp.
EVQLLEQSGAEVVRPGTSVKMSCKAAGYTFTKYWIGWVKQRPGHGLEWIGDIHPGGGFANYNEKFKGKATLTADTSSSTAYMQLSRLTSDDSAIYYCARSGYDYGSSYDYHGMDYWGQGTTVTVSSGGGGSGGGGSGGGGSELVMTQSPSSLTVTAGEKVTMSCKSSQSLLNSGNQKNYLAWYQQKPGQPPKLLIYGASTRESGVPDRFTGSGSGTDFTLTISSVQAEDLADYFCQQHYSTPYTFGGGTKLEIK

SEQ ID NO: 1607 - DNA, 762 bp, Mus sp.
  source 1..762: mol_type = genomic DNA
gaggtgcagctgctcgagcagtctggagctgaggtggttaggcctgggacttcagtgaagatgtcctgcaaggctgctggatacaccttcactaagtactggataggttgggtaaagcagaggcctggacatggccttgagtggattggagatattcaccctggaggtggttttgctaactacaatgagaagttcaagggcaaggccacactgactgcagacacatcctccagcacagcctacatgcagctcagcagactgacatctgatgactctgccatctattactgtgcaagatcgggttatgactacggtagtagttacgattaccatggtatggactactggggccaagggaccacggtcaccgtctcctcaggtggtggtggttctggcggcggcggctccggtggtggtggttctgagctcgtgatgacacagtctccatcctccctgactgtgacagcaggagagaaggtcactatgagctgcaagtccagtcagagtctgttaaacagtggaaatcaaaagaactacttggcctggtaccagcagaaaccagggcagcctcctaaactgttgatctacggggcatccactagggaatctggagtccctgatcgcttcacaggcagtggatctgggacagatttcactcttaccatcagcagtgtgcaggctgaagacctggcagattacttctgtcagcaacattatagcactccgtacacgttcggaggggggaccaagcttgagatcaaa

SEQ ID NO: 1608 - protein, 509 aa, Mus sp.
EVQLLEQSGAEVVRPGTSVKMSCKAAGYTFTKYWIGWVKQRPGHGLEWIGDIHPGGGFANYNEKFKGKATLTADTSSSTAYMQLSRLTSDDSAIYYCARSGYDYGSSYDYHGMDYWGQGTTVTVSSGGGGSGGGGSGGGGSELVMTQSPSSLTVTAGEKVTMSCKSSQSLLNSGNQKNYLAWYQQKPGQPPKLLIYGASTRESGVPDRFTGSGSGTDFTLTISSVQAEDLADYFCQQHYSTPYTFGGGTKLEIKSGGGGSEVQLVESGGGLVQPGGSLKLSCAASGFTFNKYAMNWVRQAPGKGLEWVARIRSKYNNYATYYADSVKDRFTISRDDSKNTAYLQMNNLKTEDTAVYYCVRHGNFGNSYISYWAYWGQGTLVTVSSGGGGSGGGGSGGGGSQTVVTQEPSLTVSPGGTVTLTCGSSTGAVTSGNYPNWVQQKPGQAPRGLIGGTKFLAPGTPARFSGSLLGGKAALTLSGVQPEDEAEYYCVLWYSNRWVFGGGTKLTVL

SEQ ID NO: 1609 - DNA, 1527 bp, Mus sp.
  source 1..1527: mol_type = genomic DNA
gaggtgcagctgctcgagcagtctggagctgaggtggttaggcctgggacttcagtgaagatgtcctgcaaggctgctggatacaccttcactaagtactggataggttgggtaaagcagaggcctggacatggccttgagtggattggagatattcaccctggaggtggttttgctaactacaatgagaagttcaagggcaaggccacactgactgcagacacatcctccagcacagcctacatgcagctcagcagactgacatctgatgactctgccatctattactgtgcaagatcgggttatgactacggtagtagttacgattaccatggtatggactactggggccaagggaccacggtcaccgtctcctcaggtggtggtggttctggcggcggcggctccggtggtggtggttctgagctcgtgatgacacagtctccatcctccctgactgtgacagcaggagagaaggtcactatgagctgcaagtccagtcagagtctgttaaacagtggaaatcaaaagaactacttggcctggtaccagcagaaaccagggcagcctcctaaactgttgatctacggggcatccactagggaatctggagtccctgatcgcttcacaggcagtggatctgggacagatttcactcttaccatcagcagtgtgcaggctgaagacctggcagattacttctgtcagcaacattatagcactccgtacacgttcggaggggggaccaagcttgagatcaaatccggaggtggtggatccgaggtgcagctggtcgagtctggaggaggattggtgcagcctggagggtcattgaaactctcatgtgcagcctctggattcaccttcaataagtacgccatgaactgggtccgccaggctccaggaaagggtttggaatgggttgctcgcataagaagtaaatataataattatgcaacatattatgccgattcagtgaaagacaggttcaccatctccagagatgattcaaaaaacactgcctatctacaaatgaacaacttgaaaactgaggacactgccgtgtactactgtgtgagacatgggaacttcggtaatagctacatatcctactgggcttactggggccaagggactctggtcaccgtctcctcaggtggtggtggttctggcggcggcggctccggtggtggtggttctcagactgttgtgactcaggaaccttcactcaccgtatcacctggtggaacagtcacactcacttgtggctcctcgactggggctgttacatctggcaactacccaaactgggtccaacaaaaaccaggtcaggcaccccgtggtctaataggtgggactaagttcctcgcccccggtactcctgccagattctcaggctccctgcttggaggcaaggctgccctcaccctctcaggggtacagccagaggatgaggcagaatattactgtgttctatggtacagcaaccgctgggtgttcggtggaggaaccaaactgactgtccta

SEQ ID NO: 1610 - protein, 126 aa, Mus sp.
EVQLLEQSGADLVRPGTSVKLSCKAAGYTFSRYWISWIRQRPGHGLEWIGEIYPGGGYGNYNENFKDKVTLTADTSSSTAYMQLSSLTSEDSAIYYCARSGYDYGSKYDYYGLDYWGQGTTVTVSS

SEQ ID NO: 1611 - protein, 5 aa, Mus sp.
RYWIS

SEQ ID NO: 1612 - protein, 17 aa, Mus sp.
EIYPGGGYGNYNENFKD

SEQ ID NO: 1613 - protein, 16 aa, Mus sp.
SGYDYGSKYDYYGLDY

SEQ ID NO: 1614 - DNA, 378 bp, Mus sp.
  source 1..378: mol_type = genomic DNA
gaggtgcagctgctcgagcagtctggagctgacctggtaaggcctgggacttcagtgaagctgtcctgcaaggctgctggatacaccttcagtaggtattggataagttggataaggcagaggcctggacatggccttgagtggattggagaaatttaccctggaggtggttatggtaactacaatgagaatttcaaggacaaggtcacactgactgcagacacatcctccagcacagcctatatgcagctcagcagcctgacatctgaggactctgccatctattattgtgcaagatcggggtatgactacggcagtaagtacgattattatggtttggactactggggccaagggaccacggtcaccgtctcctca

SEQ ID NO: 1615 - protein, 107 aa, Mus sp.
ELVMTQSPSSMYASLGERVTITCKASQDINSYLSWFQQKPGKSPKTLIYRANRLVDGVPSRFSGSGSGQDYSLTISSLEYEDMGIYYCLQYDAFPPTFGAGTKLEIK

SEQ ID NO: 1616 - protein, 11 aa, Mus sp.
KASQDINSYLS

SEQ ID NO: 1617 - protein, 7 aa, Mus sp.
RANRLVD

SEQ ID NO: 1618 - protein, 9 aa, Mus sp.
LQYDAFPPT

SEQ ID NO: 1619 - DNA, 321 bp, Mus sp.
  source 1..321: mol_type = genomic DNA
gagctcgtgatgacacagtctccatcttccatgtatgcatctctaggagagagagtcactatcacttgcaaggcgagtcaggacattaatagctatttaagctggttccagcagaaaccagggaaatctcctaagaccctgatctatcgtgcaaacagattggtagatggggtcccatcaaggttcagtggcagtggatctgggcaagattattctctcaccatcagcagcctggagtatgaagatatgggaatttattattgtctacagtatgatgcgtttcctcccacgttcggtgctgggaccaagcttgagatcaaa

SEQ ID NO: 1620 - protein, 248 aa, Mus sp.
EVQLLEQSGADLVRPGTSVKLSCKAAGYTFSRYWISWIRQRPGHGLEWIGEIYPGGGYGNYNENFKDKVTLTADTSSSTAYMQLSSLTSEDSAIYYCARSGYDYGSKYDYYGLDYWGQGTTVTVSSGGGGSGGGGSGGGGSELVMTQSPSSMYASLGERVTITCKASQDINSYLSWFQQKPGKSPKTLIYRANRLVDGVPSRFSGSGSGQDYSLTISSLEYEDMGIYYCLQYDAFPPTFGAGTKLEIK

SEQ ID NO: 1621 - DNA, 744 bp, Mus sp.
  source 1..744: mol_type = genomic DNA
gaggtgcagctgctcgagcagtctggagctgacctggtaaggcctgggacttcagtgaagctgtcctgcaaggctgctggatacaccttcagtaggtattggataagttggataaggcagaggcctggacatggccttgagtggattggagaaatttaccctggaggtggttatggtaactacaatgagaatttcaaggacaaggtcacactgactgcagacacatcctccagcacagcctatatgcagctcagcagcctgacatctgaggactctgccatctattattgtgcaagatcggggtatgactacggcagtaagtacgattattatggtttggactactggggccaagggaccacggtcaccgtctcctcaggtggtggtggttctggcggcggcggctccggtggtggtggttctgagctcgtgatgacacagtctccatcttccatgtatgcatctctaggagagagagtcactatcacttgcaaggcgagtcaggacattaatagctatttaagctggttccagcagaaaccagggaaatctcctaagaccctgatctatcgtgcaaacagattggtagatggggtcccatcaaggttcagtggcagtggatctgggcaagattattctctcaccatcagcagcctggagtatgaagatatgggaatttattattgtctacagtatgatgcgtttcctcccacgttcggtgctgggaccaagcttgagatcaaa

SEQ ID NO: 1622 - protein, 503 aa, Mus sp.
EVQLLEQSGADLVRPGTSVKLSCKAAGYTFSRYWISWIRQRPGHGLEWIGEIYPGGGYGNYNENFKDKVTLTADTSSSTAYMQLSSLTSEDSAIYYCARSGYDYGSKYDYYGLDYWGQGTTVTVSSGGGGSGGGGSGGGGSELVMTQSPSSMYASLGERVTITCKASQDINSYLSWFQQKPGKSPKTLIYRANRLVDGVPSRFSGSGSGQDYSLTISSLEYEDMGIYYCLQYDAFPPTFGAGTKLEIKSGGGGSEVQLVESGGGLVQPGGSLKLSCAASGFTFNKYAMNWVRQAPGKGLEWVARIRSKYNNYATYYADSVKDRFTISRDDSKNTAYLQMNNLKTEDTAVYYCVRHGNFGNSYISYWAYWGQGTLVTVSSGGGGSGGGGSGGGGSQTVVTQEPSLTVSPGGTVTLTCGSSTGAVTSGNYPNWVQQKPGQAPRGLIGGTKFLAPGTPARFSGSLLGGKAALTLSGVQPEDEAEYYCVLWYSNRWVFGGGTKLTVL

SEQ ID NO: 1623 - DNA, 1509 bp, Mus sp.
  source 1..1509: mol_type = genomic DNA
gaggtgcagctgctcgagcagtctggagctgacctggtaaggcctgggacttcagtgaagctgtcctgcaaggctgctggatacaccttcagtaggtattggataagttggataaggcagaggcctggacatggccttgagtggattggagaaatttaccctggaggtggttatggtaactacaatgagaatttcaaggacaaggtcacactgactgcagacacatcctccagcacagcctatatgcagctcagcagcctgacatctgaggactctgccatctattattgtgcaagatcggggtatgactacggcagtaagtacgattattatggtttggactactggggccaagggaccacggtcaccgtctcctcaggtggtggtggttctggcggcggcggctccggtggtggtggttctgagctcgtgatgacacagtctccatcttccatgtatgcatctctaggagagagagtcactatcacttgcaaggcgagtcaggacattaatagctatttaagctggttccagcagaaaccagggaaatctcctaagaccctgatctatcgtgcaaacagattggtagatggggtcccatcaaggttcagtggcagtggatctgggcaagattattctctcaccatcagcagcctggagtatgaagatatgggaatttattattgtctacagtatgatgcgtttcctcccacgttcggtgctgggaccaagcttgagatcaaatccggaggtggtggatccgaggtgcagctggtcgagtctggaggaggattggtgcagcctggagggtcattgaaactctcatgtgcagcctctggattcaccttcaataagtacgccatgaactgggtccgccaggctccaggaaagggtttggaatgggttgctcgcataagaagtaaatataataattatgcaacatattatgccgattcagtgaaagacaggttcaccatctccagagatgattcaaaaaacactgcctatctacaaatgaacaacttgaaaactgaggacactgccgtgtactactgtgtgagacatgggaacttcggtaatagctacatatcctactgggcttactggggccaagggactctggtcaccgtctcctcaggtggtggtggttctggcggcggcggctccggtggtggtggttctcagactgttgtgactcaggaaccttcactcaccgtatcacctggtggaacagtcacactcacttgtggctcctcgactggggctgttacatctggcaactacccaaactgggtccaacaaaaaccaggtcaggcaccccgtggtctaataggtgggactaagttcctcgcccccggtactcctgccagattctcaggctccctgcttggaggcaaggctgccctcaccctctcaggggtacagccagaggatgaggcagaatattactgtgttctatggtacagcaaccgctgggtgttcggtggaggaaccaaactgactgtccta

SEQ ID NO: 1624 - protein, 126 aa, Mus sp.; identical to SEQ ID NO: 1610

SEQ ID NO: 1625 - protein, 5 aa, Mus sp.
RYWIS

SEQ ID NO: 1626 - protein, 17 aa, Mus sp.
EIYPGGGYGNYNENFKD

SEQ ID NO: 1627 - protein, 16 aa, Mus sp.
SGYDYGSKYDYYGLDY

SEQ ID NO: 1628 - DNA, 378 bp, Mus sp.; identical to SEQ ID NO: 1614
  source 1..378: mol_type = genomic DNA

SEQ ID NO: 1629 - protein, 107 aa, Mus sp.
ELVMTQSPSSLSASLGERVSLTCRASQEISGYLSWLQQKPDGTIKRLIYAASTLDSGVPKRFSGSRSGSDYSLTISSLESEDFADYYCLQYASSPYTFGGGTKLEIK

SEQ ID NO: 1630 - protein, 11 aa, Mus sp.
RASQEISGYLS

SEQ ID NO: 1631 - protein, 7 aa, Mus sp.
AASTLDS

SEQ ID NO: 1632 - protein, 9 aa, Mus sp.
LQYASSPYT

SEQ ID NO: 1633 - DNA, 321 bp, Mus sp.
  source 1..321: mol_type = genomic DNA
gagctcgtcatgacccagtctccatcctccttatctgcctctctgggagaaagagtcagtctcacttgtcgggcaagtcaggaaattagtggttacttaagctggcttcagcagaaaccagatggaactattaaacgcctgatctacgccgcatccactttagattctggtgtcccaaaaaggttcagtggcagtaggtctgggtcagattattctctcaccatcagcagccttgagtctgaagattttgcagactattactgtctacaatatgctagttctccgtacacgttcggaggggggaccaagcttgagatcaaa

SEQ ID NO: 1634 - protein, 248 aa, Mus sp.
EVQLLEQSGADLVRPGTSVKLSCKAAGYTFSRYWISWIRQRPGHGLEWIGEIYPGGGYGNYNENFKDKVTLTADTSSSTAYMQLSSLTSEDSAIYYCARSGYDYGSKYDYYGLDYWGQGTTVTVSSGGGGSGGGGSGGGGSELVMTQSPSSLSASLGERVSLTCRASQEISGYLSWLQQKPDGTIKRLIYAASTLDSGVPKRFSGSRSGSDYSLTISSLESEDFADYYCLQYASSPYTFGGGTKLEIK

SEQ ID NO: 1635 - DNA, 744 bp, Mus sp.
  source 1..744: mol_type = genomic DNA
gaggtgcagctgctcgagcagtctggagctgacctggtaaggcctgggacttcagtgaagctgtcctgcaaggctgctggatacaccttcagtaggtattggataagttggataaggcagaggcctggacatggccttgagtggattggagaaatttaccctggaggtggttatggtaactacaatgagaatttcaaggacaaggtcacactgactgcagacacatcctccagcacagcctatatgcagctcagcagcctgacatctgaggactctgccatctattattgtgcaagatcggggtatgactacggcagtaagtacgattattatggtttggactactggggccaagggaccacggtcaccgtctcctcaggtggtggtggttctggcggcggcggctccggtggtggtggttctgagctcgtcatgacccagtctccatcctccttatctgcctctctgggagaaagagtcagtctcacttgtcgggcaagtcaggaaattagtggttacttaagctggcttcagcagaaaccagatggaactattaaacgcctgatctacgccgcatccactttagattctggtgtcccaaaaaggttcagtggcagtaggtctgggtcagattattctctcaccatcagcagccttgagtctgaagattttgcagactattactgtctacaatatgctagttctccgtacacgttcggaggggggaccaagcttgagatcaaa

SEQ ID NO: 1636 - protein, 503 aa, Mus sp.
EVQLLEQSGADLVRPGTSVKLSCKAAGYTFSRYWISWIRQRPGHGLEWIGEIYPGGGYGNYNENFKDKVTLTADTSSSTAYMQLSSLTSEDSAIYYCARSGYDYGSKYDYYGLDYWGQGTTVTVSSGGGGSGGGGSGGGGSELVMTQSPSSLSASLGERVSLTCRASQEISGYLSWLQQKPDGTIKRLIYAASTLDSGVPKRFSGSRSGSDYSLTISSLESEDFADYYCLQYASSPYTFGGGTKLEIKSGGGGSEVQLVESGGGLVQPGGSLKLSCAASGFTFNKYAMNWVRQAPGKGLEWVARIRSKYNNYATYYADSVKDRFTISRDDSKNTAYLQMNNLKTEDTAVYYCVRHGNFGNSYISYWAYWGQGTLVTVSSGGGGSGGGGSGGGGSQTVVTQEPSLTVSPGGTVTLTCGSSTGAVTSGNYPNWVQQKPGQAPRGLIGGTKFLAPGTPARFSGSLLGGKAALTLSGVQPEDEAEYYCVLWYSNRWVFGGGTKLTVL

SEQ ID NO: 1637 - DNA, 1509 bp, Mus sp.
  source 1..1509: mol_type = genomic DNA
gaggtgcagctgctcgagcagtctggagctgacctggtaaggcctgggacttcagtgaagctgtcctgcaaggctgctggatacaccttcagtaggtattggataagttggataaggcagaggcctggacatggccttgagtggattggagaaatttaccctggaggtggttatggtaactacaatgagaatttcaaggacaaggtcacactgactgcagacacatcctccagcacagcctatatgcagctcagcagcctgacatctgaggactctgccatctattattgtgcaagatcggggtatgactacggcagtaagtacgattattatggtttggactactggggccaagggaccacggtcaccgtctcctcaggtggtggtggttctggcggcggcggctccggtggtggtggttctgagctcgtcatgacccagtctccatcctccttatctgcctctctgggagaaagagtcagtctcacttgtcgggcaagtcaggaaattagtggttacttaagctggcttcagcagaaaccagatggaactattaaacgcctgatctacgccgcatccactttagattctggtgtcccaaaaaggttcagtggcagtaggtctgggtcagattattctctcaccatcagcagccttgagtctgaagattttgcagactattactgtctacaatatgctagttctccgtacacgttcggaggggggaccaagcttgagatcaaatccggaggtggtggatccgaggtgcagctggtcgagtctggaggaggattggtgcagcctggagggtcattgaaactctcatgtgcagcctctggattcaccttcaataagtacgccatgaactgggtccgccaggctccaggaaagggtttggaatgggttgctcgcataagaagtaaatataataattatgcaacatattatgccgattcagtgaaagacaggttcaccatctccagagatgattcaaaaaacactgcctatctacaaatgaacaacttgaaaactgaggacactgccgtgtactactgtgtgagacatgggaacttcggtaatagctacatatcctactgggcttactggggccaagggactctggtcaccgtctcctcaggtggtggtggttctggcggcggcggctccggtggtggtggttctcagactgttgtgactcaggaaccttcactcaccgtatcacctggtggaacagtcacactcacttgtggctcctcgactggggctgttacatctggcaactacccaaactgggtccaacaaaaaccaggtcaggcaccccgtggtctaataggtgggactaagttcctcgcccccggtactcctgccagattctcaggctccctgcttggaggcaaggctgccctcaccctctcaggggtacagccagaggatgaggcagaatattactgtgttctatggtacagcaaccgctgggtgttcggtggaggaaccaaactgactgtccta

SEQ ID NO: 1638 - protein, 126 aa, Mus sp.
EVQLLEQSGAELMKPGASVKISCKATGYTFSNYWIGWVKQRPGHGLEWIGDIYPGGSYTNYNEKFKGKVTLTADTSSRTAYMQLSSLTFEDSAIYYCARSGYDYASDYDYHGMDYWGQGTTVTVSS

SEQ ID NO: 1639 - protein, 5 aa, Mus sp.
NYWIG

SEQ ID NO: 1640 - protein, 17 aa, Mus sp.
DIYPGGSYTNYNEKFKG

SEQ ID NO: 1641 - protein, 16 aa, Mus sp.
SGYDYASDYDYHGMDY

SEQ ID NO: 1642 - DNA, 378 bp, Mus sp.
  source 1..378: mol_type = genomic DNA
gaggtgcagctgctcgagcagtctggagctgagctgatgaagcctggggcctcagtgaagatatcctgcaaggctactggatacaccttcagtaattactggataggttgggtaaagcagaggcctggacatggccttgagtggattggagatatttaccctggaggtagttatactaactacaatgagaaattcaagggcaaggtcacactgactgcagacacatcctccaggacagcctacatgcagctcagcagcctgacatttgaggactctgccatctattactgtgcaagatcggggtatgactacgctagtgactacgattaccatggtatggactactggggccaagggaccacggtcaccgtctcctca

SEQ ID NO: 1643 - protein, 107 aa, Mus sp.
ELVLTQSPSSMSASLGDRITITCQATQDIVKNLNWYQQKPGKPPSFLIYYATELAEGVPSRFSGSGSGSDYSLTISNLESEDFADYYCLQFYEFPYTFGGGTKLEIK

SEQ ID NO: 1644 - protein, 11 aa, Mus sp.
QATQDIVKNLN

SEQ ID NO: 1645 - protein, 7 aa, Mus sp.
YATELAE

SEQ ID NO: 1646 - protein, 9 aa, Mus sp.
LQFYEFPYT

SEQ ID NO: 1647 - DNA, 321 bp, Mus sp.
  source 1..321: mol_type = genomic DNA
gagctcgtgctcacccagtctccatcctctatgtctgcatctctgggagacagaataaccatcacttgccaggcaactcaagacattgttaagaatttaaactggtatcagcagaaaccagggaaacccccttcattcctgatctattatgcaactgaactggcagaaggggtcccatcaaggttcagtggcagtgggtctgggtcagactattctctgacaatcagcaacctggagtctgaagattttgcagactattactgtctacagttttatgagtttccgtacacgttcggaggggggaccaagcttgagatcaaa

SEQ ID NO: 1648 - protein, 248 aa, Mus sp.
EVQLLEQSGAELMKPGASVKISCKATGYTFSNYWIGWVKQRPGHGLEWIGDIYPGGSYTNYNEKFKGKVTLTADTSSRTAYMQLSSLTFEDSAIYYCARSGYDYASDYDYHGMDYWGQGTTVTVSSGGGGSGGGGSGGGGSELVLTQSPSSMSASLGDRITITCQATQDIVKNLNWYQQKPGKPPSFLIYYATELAEGVPSRFSGSGSGSDYSLTISNLESEDFADYYCLQFYEFPYTFGGGTKLEIK

SEQ ID NO: 1649 - DNA, 744 bp, Mus sp.
  source 1..744: mol_type = genomic DNA
gaggtgcagctgctcgagcagtctggagctgagctgatgaagcctggggcctcagtgaagatatcctgcaaggctactggatacaccttcagtaattactggataggttgggtaaagcagaggcctggacatggccttgagtggattggagatatttaccctggaggtagttatactaactacaatgagaaattcaagggcaaggtcacactgactgcagacacatcctccaggacagcctacatgcagctcagcagcctgacatttgaggactctgccatctattactgtgcaagatcggggtatgactacgctagtgactacgattaccatggtatggactactggggccaagggaccacggtcaccgtctcctcaggtggtggtggttctggcggcggcggctccggtggtggtggttctgagctcgtgctcacccagtctccatcctctatgtctgcatctctgggagacagaataaccatcacttgccaggcaactcaagacattgttaagaatttaaactggtatcagcagaaaccagggaaacccccttcattcctgatctattatgcaactgaactggcagaaggggtcccatcaaggttcagtggcagtgggtctgggtcagactattctctgacaatcagcaacctggagtctgaagattttgcagactattactgtctacagttttatgagtttccgtacacgttcggaggggggaccaagcttgagatcaaa

SEQ ID NO: 1650 - protein, 503 aa, Mus sp.
EVQLLEQSGAELMKPGASVKISCKATGYTFSNYWIGWVKQRPGHGLEWIGDIYPGGSYTNYNEKFKGKVTLTADTSSRTAYMQLSSLTFEDSAIYYCARSGYDYASDYDYHGMDYWGQGTTVTVSSGGGGSGGGGSGGGGSELVLTQSPSSMSASLGDRITITCQATQDIVKNLNWYQQKPGKPPSFLIYYATELAEGVPSRFSGSGSGSDYSLTISNLESEDFADYYCLQFYEFPYTFGGGTKLEIKSGGGGSEVQLVESGGGLVQPGGSLKLSCAASGFTFNKYAMNWVRQAPGKGLEWVARIRSKYNNYATYYADSVKDRFTISRDDSKNTAYLQMNNLKTEDTAVYYCVRHGNFGNSYISYWAYWGQGTLVTVSSGGGGSGGGGSGGGGSQTVVTQEPSLTVSPGGTVTLTCGSSTGAVTSGNYPNWVQQKPGQAPRGLIGGTKFLAPGTPARFSGSLLGGKAALTLSGVQPEDEAEYYCVLWYSNRWVFGGGTKLTVL

SEQ ID NO: 1651 - DNA, 1509 bp, Mus sp.
  source 1..1509: mol_type = genomic DNA
gaggtgcagctgctcgagcagtctggagctgagctgatgaagcctggggcctcagtgaagatatcctgcaaggctactggatacaccttcagtaattactggataggttgggtaaagcagaggcctggacatggccttgagtggattggagatatttaccctggaggtagttatactaactacaatgagaaattcaagggcaaggtcacactgactgcagacacatcctccaggacagcctacatgcagctcagcagcctgacatttgaggactctgccatctattactgtgcaagatcggggtatgactacgctagtgactacgattaccatggtatggactactggggccaagggaccacggtcaccgtctcctcaggtggtggtggttctggcggcggcggctccggtggtggtggttctgagctcgtgctcacccagtctccatcctctatgtctgcatctctgggagacagaataaccatcacttgccaggcaactcaagacattgttaagaatttaaactggtatcagcagaaaccagggaaacccccttcattcctgatctattatgcaactgaactggcagaaggggtcccatcaaggttcagtggcagtgggtctgggtcagactattctctgacaatcagcaacctggagtctgaagattttgcagactattactgtctacagttttatgagtttccgtacacgttcggaggggggaccaagcttgagatcaaatccggaggtggtggatccgaggtgcagctggtcgagtctggaggaggattggtgcagcctggagggtcattgaaactctcatgtgcagcctctggattcaccttcaataagtacgccatgaactgggtccgccaggctccaggaaagggtttggaatgggttgctcgcataagaagtaaatataataattatgcaacatattatgccgattcagtgaaagacaggttcaccatctccagagatgattcaaaaaacactgcctatctacaaatgaacaacttgaaaactgaggacactgccgtgtactactgtgtgagacatgggaacttcggtaatagctacatatcctactgggcttactggggccaagggactctggtcaccgtctcctcaggtggtggtggttctggcggcggcggctccggtggtggtggttctcagactgttgtgactcaggaaccttcactcaccgtatcacctggtggaacagtcacactcacttgtggctcctcgactggggctgttacatctggcaactacccaaactgggtccaacaaaaaccaggtcaggcaccccgtggtctaataggtgggactaagttcctcgcccccggtactcctgccagattctcaggctccctgcttggaggcaaggctgccctcaccctctcaggggtacagccagaggatgaggcagaatattactgtgttctatggtacagcaaccgctgggtgttcggtggaggaaccaaactgactgtccta

SEQ ID NO: 1652 - protein, 124 aa, synthetic construct
  REGION 1..124: note = EN00B12-H
QVQLVQSGPEVKKPGASVKLSCKASGYTFTDYVIHWVKQAPGQRLEWMGYINPYDDDTTYNQKFKGRVTITVDTSASTAYMELNSLRSEDTAVYYCARRGNSYDGYFDYSMDYWGQGTLVTVSS

SEQ ID NO: 1653 - protein, 5 aa, synthetic construct
  REGION 1..5: note = EN00B12-HCDR1
DYVIH

SEQ ID NO: 1654 - protein, 17 aa, synthetic construct
  REGION 1..17: note = EN00B12-HCDR2
YINPYDDDTTYNQKFKG

SEQ ID NO: 1655 - protein, 15 aa, synthetic construct
  REGION 1..15: note = EN00B12-HCDR3
RGNSYDGYFDYSMDY

SEQ ID NO: 1656 - DNA, 372 bp, synthetic construct
  misc_feature 1..372: note = EN00B12-H
  source 1..372: mol_type = other DNA
caggtgcagctggtccagtcaggacctgaggtgaagaagcctggggcttcagtgaagttgtcctgcaaggcttctggatacacattcactgactatgttatacactgggtgaagcaggcacctggacagcgccttgagtggatgggatatattaatccttatgatgatgatactacctacaaccagaagttcaagggccgggtcacaattactgtagacacatccgccagcacagcctacatggagctcaacagcctgagatctgaggacactgcagtctattactgtgcaagaagggggaactcctatgatggttacttcgactattctatggactactggggtcaaggaaccttggtcaccgtctcctca

SEQ ID NO: 1657 - protein, 108 aa, synthetic construct
  REGION 1..108: note = EN00B12-L
DIQLTQSPSFLSASVGDRVTITCRASQNVGTAVAWYQQKPGKAPKLLIYSASNRYTGVPSRFSGSGSGTEFTLTISSLQPEDFATYYCQQYTNYPMYTFGQGTKLEIK

SEQ ID NO: 1658 - protein, 11 aa, synthetic construct
  REGION 1..11: note = EN00B12-LCDR1
RASQNVGTAVA

SEQ ID NO: 1659 - protein, 7 aa, synthetic construct
  REGION 1..7: note = EN00B12-LCDR2
SASNRYT

SEQ ID NO: 1660 - protein, 10 aa, synthetic construct
  REGION 1..10: note = EN00B12-LCDR3
QQYTNYPMYT

SEQ ID NO: 1661 - DNA, 324 bp, synthetic construct
  misc_feature 1..324: note = EN00B12-L
  source 1..324: mol_type = other DNA
gacatccagctgacccagtctccaagcttcctgtccgcatcagtaggagacagagtcaccatcacctgcagggccagtcagaatgtgggtactgctgtagcctggtatcaacagaaaccaggaaaagcccctaaattactgatttactcggcatcgaatcggtacactggagtccctagtcgcttctcaggcagtggatctgggacagagttcactctcaccatcagcagtctgcagcctgaagacttcgcaacttattactgccagcaatataccaactatcccatgtatacgtttggacaggggaccaagctggaaataaaa

SEQ ID NO: 1662 - protein, 247 aa, synthetic construct
  REGION 1..247: note = EN00B12-HL
QVQLVQSGPEVKKPGASVKLSCKASGYTFTDYVIHWVKQAPGQRLEWMGYINPYDDDTTYNQKFKGRVTITVDTSASTAYMELNSLRSEDTAVYYCARRGNSYDGYFDYSMDYWGQGTLVTVSSGGGGSGGGGSGGGGSDIQLTQSPSFLSASVGDRVTITCRASQNVGTAVAWYQQKPGKAPKLLIYSASNRYTGVPSRFSGSGSGTEFTLTISSLQPEDFATYYCQQYTNYPMYTFGQGTKLEIK

SEQ ID NO: 1663 - DNA, 741 bp, synthetic construct
  misc_feature 1..741: note = EN00B12-HL
  source 1..741: mol_type = other DNA
caggtgcagctggtccagtcaggacctgaggtgaagaagcctggggcttcagtgaagttgtcctgcaaggcttctggatacacattcactgactatgttatacactgggtgaagcaggcacctggacagcgccttgagtggatgggatatattaatccttatgatgatgatactacctacaaccagaagttcaagggccgggtcacaattactgtagacacatccgccagcacagcctacatggagctcaacagcctgagatctgaggacactgcagtctattactgtgcaagaagggggaactcctatgatggttacttcgactattctatggactactggggtcaaggaaccttggtcaccgtctcctcaggtggtggtggttctggcggcggcggctccggtggtggtggttctgacatccagctgacccagtctccaagcttcctgtccgcatcagtaggagacagagtcaccatcacctgcagggccagtcagaatgtgggtactgctgtagcctggtatcaacagaaaccaggaaaagcccctaaattactgatttactcggcatcgaatcggtacactggagtccctagtcgcttctcaggcagtggatctgggacagagttcactctcaccatcagcagtctgcagcctgaagacttcgcaacttattactgccagcaatataccaactatcccatgtatacgtttggacaggggaccaagctggaaataaaa

SEQ ID NO: 1664 - protein, 502 aa, synthetic construct
  REGION 1..502: note = EN00B12 HL x I2C HL
QVQLVQSGPEVKKPGASVKLSCKASGYTFTDYVIHWVKQAPGQRLEWMGYINPYDDDTTYNQKFKGRVTITVDTSASTAYMELNSLRSEDTAVYYCARRGNSYDGYFDYSMDYWGQGTLVTVSSGGGGSGGGGSGGGGSDIQLTQSPSFLSASVGDRVTITCRASQNVGTAVAWYQQKPGKAPKLLIYSASNRYTGVPSRFSGSGSGTEFTLTISSLQPEDFATYYCQQYTNYPMYTFGQGTKLEIKSGGGGSEVQLVESGGGLVQPGGSLKLSCAASGFTFNKYAMNWVRQAPGKGLEWVARIRSKYNNYATYYADSVKDRFTISRDDSKNTAYLQMNNLKTEDTAVYYCVRHGNFGNSYISYWAYWGQGTLVTVSSGGGGSGGGGSGGGGSQTVVTQEPSLTVSPGGTVTLTCGSSTGAVTSGNYPNWVQQKPGQAPRGLIGGTKFLAPGTPARFSGSLLGGKAALTLSGVQPEDEAEYYCVLWYSNRWVFGGGTKLTVL

SEQ ID NO: 1665 - DNA, 1506 bp, synthetic construct
  misc_feature 1..1506: note = EN00B12 HL x I2C HL
  source 1..1506: mol_type = other DNA
caggtgcagctggtccagtcaggacctgaggtgaagaagcctggggcttcagtgaagttgtcctgcaaggcttctggatacacattcactgactatgttatacactgggtgaagcaggcacctggacagcgccttgagtggatgggatatattaatccttatgatgatgatactacctacaaccagaagttcaagggccgggtcacaattactgtagacacatccgccagcacagcctacatggagctcaacagcctgagatctgaggacactgcagtctattactgtgcaagaagggggaactcctatgatggttacttcgactattctatggactactggggtcaaggaaccttggtcaccgtctcctcaggtggtggtggttctggcggcggcggctccggtggtggtggttctgacatccagctgacccagtctccaagcttcctgtccgcatcagtaggagacagagtcaccatcacctgcagggccagtcagaatgtgggtactgctgtagcctggtatcaacagaaaccaggaaaagcccctaaattactgatttactcggcatcgaatcggtacactggagtccctagtcgcttctcaggcagtggatctgggacagagttcactctcaccatcagcagtctgcagcctgaagacttcgcaacttattactgccagcaatataccaactatcccatgtatacgtttggacaggggaccaagctggaaataaaatccggaggtggtggatccgaggtgcagctggtcgagtctggaggaggattggtgcagcctggagggtcattgaaactctcatgtgcagcctctggattcaccttcaataagtacgccatgaactgggtccgccaggctccaggaaagggtttggaatgggttgctcgcataagaagtaaatataataattatgcaacatattatgccgattcagtgaaagacaggttcaccatctccagagatgattcaaaaaacactgcctatctacaaatgaacaacttgaaaactgaggacactgccgtgtactactgtgtgagacatgggaacttcggtaatagctacatatcctactgggcttactggggccaagggactctggtcaccgtctcctcaggtggtggtggttctggcggcggcggctccggtggtggtggttctcagactgttgtgactcaggaaccttcactcaccgtatcacctggtggaacagtcacactcacttgtggctcctcgactggggctgttacatctggcaactacccaaactgggtccaacaaaaaccaggtcaggcaccccgtggtctaataggtgggactaagttcctcgcccccggtactcctgccagattctcaggctccctgcttggaggcaaggctgccctcaccctctcaggggtacagccagaggatgaggcagaatattactgtgttctatggtacagcaaccgctgggtgttcggtggaggaaccaaactgactgtccta

SEQ ID NO: 1666 - protein, 124 aa, synthetic construct
  REGION 1..124: note = EN00C3-H
QVQLVQSGPEVKKPGASVKMSCKASGYTFTDYVIHWVRQGPGQRLEWMGYINPYDDDTTYNQKFKGRVTMTLDKSASTAYMQLNSLRSEDTAVYYCARRGNSYDGYFDYSMDYWGQGTLVTVSS

SEQ ID NO: 1667 - protein, 5 aa, synthetic construct
  REGION 1..5: note = EN00C3-HCDR1
DYVIH

SEQ ID NO: 1668 - protein, 17 aa, synthetic construct
  REGION 1..17: note = EN00C3-HCDR2
YINPYDDDTTYNQKFKG

SEQ ID NO: 1669 - protein, 15 aa, synthetic construct
  REGION 1..15: note = EN00C3-HCDR3
RGNSYDGYFDYSMDY

SEQ ID NO: 1670 - DNA, 372 bp, synthetic construct
  misc_feature 1..372: note = EN00C3-H
  source 1..372: mol_type = other DNA
caggtgcagctggtccagtcaggacctgaggtgaagaagcctggggcttcagtgaagatgtcctgcaaggcttctggatacacattcactgactatgttatacactgggtgaggcagggacctggacagcgtcttgagtggatgggatatattaatccttatgatgatgatactacctacaaccagaagttcaagggccgggtcacaatgactctagacaaatccgccagcacagcctacatgcaactcaacagcctgagatctgaggacactgcagtctattactgtgcaagaagggggaactcctatgatggttacttcgactattctatggactactggggtcaaggaaccttggtcaccgtctcctca

SEQ ID NO: 1671 - protein, 108 aa, synthetic construct
  REGION 1..108: note = EN00C3-L
DIQLTQSPNFLSASVGDRVTITCRASQNVGTAVAWYQQKPGKAPKLLIYSASNRYTGVPSRFSGSGSGTDFTLTISSLQPEDFATYYCQQYTNYPMYTFGQGTKLEIK

SEQ ID NO: 1672 - protein, 11 aa, synthetic construct
  REGION 1..11: note = EN00C3-LCDR1
RASQNVGTAVA

SEQ ID NO: 1673 - protein, 7 aa, synthetic construct
  REGION 1..7: note = EN00C3-LCDR2
SASNRYT

SEQ ID NO: 1674 - protein, 10 aa, synthetic construct
  REGION 1..10: note = EN00C3-LCDR3
QQYTNYPMYT

SEQ ID NO: 1675 - DNA, 324 bp, synthetic construct
  misc_feature 1..324: note = EN00C3-L
  source 1..324: mol_type = other DNA
gacatccagctgacccagtctccaaacttcctgtccgcatcagtaggagacagagtcaccatcacctgcagggccagtcagaatgtgggtactgctgtagcctggtatcaacagaaaccaggaaaagcccctaaattactgatttactcggcatcgaatcggtacactggagtccctagtcgcttctcaggcagtggatctgggacagatttcactctcaccatcagcagtctgcagcctgaagacttcgcaacttattactgccagcaatataccaactatcccatgtatacgtttggacaggggaccaagctggaaataaaa

SEQ ID NO: 1676 - protein, 247 aa, synthetic construct
  REGION 1..247: note = EN00C3-HL
QVQLVQSGPEVKKPGASVKMSCKASGYTFTDYVIHWVRQGPGQRLEWMGYINPYDDDTTYNQKFKGRVTMTLDKSASTAYMQLNSLRSEDTAVYYCARRGNSYDGYFDYSMDYWGQGTLVTVSSGGGGSGGGGSGGGGSDIQLTQSPNFLSASVGDRVTITCRASQNVGTAVAWYQQKPGKAPKLLIYSASNRYTGVPSRFSGSGSGTDFTLTISSLQPEDFATYYCQQYTNYPMYTFGQGTKLEIK

SEQ ID NO: 1677 - DNA, 741 bp, synthetic construct
  misc_feature 1..741: note = EN00C3-HL
  source 1..741: mol_type = other DNA
caggtgcagctggtccagtcaggacctgaggtgaagaagcctggggcttcagtgaagatgtcctgcaaggcttctggatacacattcactgactatgttatacactgggtgaggcagggacctggacagcgtcttgagtggatgggatatattaatccttatgatgatgatactacctacaaccagaagttcaagggccgggtcacaatgactctagacaaatccgccagcacagcctacatgcaactcaacagcctgagatctgaggacactgcagtctattactgtgcaagaagggggaactcctatgatggttacttcgactattctatggactactggggtcaaggaaccttggtcaccgtctcctcaggtggtggtggttctggcggcggcggctccggtggtggtggttctgacatccagctgacccagtctccaaacttcctgtccgcatcagtaggagacagagtcaccatcacctgcagggccagtcagaatgtgggtactgctgtagcctggtatcaacagaaaccaggaaaagcccctaaattactgatttactcggcatcgaatcggtacactggagtccctagtcgcttctcaggcagtggatctgggacagatttcactctcaccatcagcagtctgcagcctgaagacttcgcaacttattactgccagcaatataccaactatcccatgtatacgtttggacaggggaccaagctggaaataaaa

SEQ ID NO: 1678 - protein, 502 aa, synthetic construct
  REGION 1..502: note = EN00C3 HL x I2C HL
QVQLVQSGPEVKKPGASVKMSCKASGYTFTDYVIHWVRQGPGQRLEWMGYINPYDDDTTYNQKFKGRVTMTLDKSASTAYMQLNSLRSEDTAVYYCARRGNSYDGYFDYSMDYWGQGTLVTVSSGGGGSGGGGSGGGGSDIQLTQSPNFLSASVGDRVTITCRASQNVGTAVAWYQQKPGKAPKLLIYSASNRYTGVPSRFSGSGSGTDFTLTISSLQPEDFATYYCQQYTNYPMYTFGQGTKLEIKSGGGGSEVQLVESGGGLVQPGGSLKLSCAASGFTFNKYAMNWVRQAPGKGLEWVARIRSKYNNYATYYADSVKDRFTISRDDSKNTAYLQMNNLKTEDTAVYYCVRHGNFGNSYISYWAYWGQGTLVTVSSGGGGSGGGGSGGGGSQTVVTQEPSLTVSPGGTVTLTCGSSTGAVTSGNYPNWVQQKPGQAPRGLIGGTKFLAPGTPARFSGSLLGGKAALTLSGVQPEDEAEYYCVLWYSNRWVFGGGTKLTVL

SEQ ID NO: 1679 - DNA, 1506 bp, synthetic construct
  misc_feature 1..1506: note = EN00C3 HL x I2C HL
  source 1..1506: mol_type = other DNA
caggtgcagctggtccagtcaggacctgaggtgaagaagcctggggcttcagtgaagatgtcctgcaaggcttctggatacacattcactgactatgttatacactgggtgaggcagggacctggacagcgtcttgagtggatgggatatattaatccttatgatgatgatactacctacaaccagaagttcaagggccgggtcacaatgactctagacaaatccgccagcacagcctacatgcaactcaacagcctgagatctgaggacactgcagtctattactgtgcaagaagggggaactcctatgatggttacttcgactattctatggactactggggtcaaggaaccttggtcaccgtctcctcaggtggtggtggttctggcggcggcggctccggtggtggtggttctgacatccagctgacccagtctccaaacttcctgtccgcatcagtaggagacagagtcaccatcacctgcagggccagtcagaatgtgggtactgctgtagcctggtatcaacagaaaccaggaaaagcccctaaattactgatttactcggcatcgaatcggtacactggagtccctagtcgcttctcaggcagtggatctgggacagatttcactctcaccatcagcagtctgcagcctgaagacttcgcaacttattactgccagcaatataccaactatcccatgtatacgtttggacaggggaccaagctggaaataaaatccggaggtggtggatccgaggtgcagctggtcgagtctggaggaggattggtgcagcctggagggtcattgaaactctcatgtgcagcctctggattcaccttcaataagtacgccatgaactgggtccgccaggctccaggaaagggtttggaatgggttgctcgcataagaagtaaatataataattatgcaacatattatgccgattcagtgaaagacaggttcaccatctccagagatgattcaaaaaacactgcctatctacaaatgaacaacttgaaaactgaggacactgccgtgtactactgtgtgagacatgggaacttcggtaatagctacatatcctactgggcttactggggccaagggactctggtcaccgtctcctcaggtggtggtggttctggcggcggcggctccggtggtggtggttctcagactgttgtgactcaggaaccttcactcaccgtatcacctggtggaacagtcacactcacttgtggctcctcgactggggctgttacatctggcaactacccaaactgggtccaacaaaaaccaggtcaggcaccccgtggtctaataggtgggactaagttcctcgcccccggtactcctgccagattctcaggctccctgcttggaggcaaggctgccctcaccctctcaggggtacagccagaggatgaggcagaatattactgtgttctatggtacagcaaccgctgggtgttcggtggaggaaccaaactgactgtccta

SEQ ID NO: 1680 - protein, 124 aa, synthetic construct
  REGION 1..124: note = EN01D5-H
QVQLVQSGPEVMKPGASVKMSCKASGYTFTDYVIHWVRQAPGKRLEWMGYINPYDDDTTYNQKFKGRVTITVDKSASTAYMELNSLTSEDTAVYYCARRGNSYDGYFDYSMDYWGQGTLVTVSS

SEQ ID NO: 1681 - protein, 5 aa, synthetic construct
  REGION 1..5: note = EN01D5-HCDR1
DYVIH

SEQ ID NO: 1682 - protein, 17 aa, synthetic construct
  REGION 1..17: note = EN01D5-HCDR2
YINPYDDDTTYNQKFKG

SEQ ID NO: 1683 - protein, 15 aa, synthetic construct
  REGION 1..15: note = EN01D5-HCDR3
RGNSYDGYFDYSMDY

SEQ ID NO: 1684 - DNA, 372 bp, synthetic construct; identical to SEQ ID NO: 1246
  misc_feature 1..372: note = EN01D5-H
  source 1..372: mol_type = other DNA

SEQ ID NO: 1685 - protein, 108 aa, synthetic construct
  REGION 1..108: note = EN01D5-L
DIQLTQSPSFMSASVGDRVTITCRASQNVGTAVAWYQQKPGQAPKLLIYSASNRYTGVPSRFSGSGSGTEFTLTISSLQSEDFATYYCQQYTNYPMYTFGQGTKLEIK

SEQ ID NO: 1686 - protein, 11 aa, synthetic construct
  REGION 1..11: note = EN01D5-LCDR1
RASQNVGTAVA

SEQ ID NO: 1687 - protein, 7 aa, synthetic construct
  REGION 1..7: note = EN01D5-LCDR2
SASNRYT

SEQ ID NO: 1688 - protein, 10 aa, synthetic construct
  REGION 1..10: note = EN01D5-LCDR3
QQYTNYPMYT

SEQ ID NO: 1689 - DNA, 324 bp, synthetic construct
  misc_feature 1..324: note = EN01D5-L
  source 1..324: mol_type = other DNA
gacatccagctgacccagtctccaagcttcatgtccgcatcagtaggagacagagtcaccatcacctgcagggccagtcagaatgtgggtactgctgtagcctggtatcaacagaaaccaggacaagcccctaaattactgatttactcggcatcgaatcggtacactggagtccctagtcgcttctcaggcagtggatctgggacagagttcactctcaccatcagcagtctgcagtctgaagacttcgcaacttattactgccagcaatataccaactatcccatgtatacgtttggacaggggaccaagctggaaataaaa

SEQ ID NO: 1690 - protein, 247 aa, synthetic construct
  REGION 1..247: note = EN01D5-HL
QVQLVQSGPEVMKPGASVKMSCKASGYTFTDYVIHWVRQAPGKRLEWMGYINPYDDDTTYNQKFKGRVTITVDKSASTAYMELNSLTSEDTAVYYCARRGNSYDGYFDYSMDYWGQGTLVTVSSGGGGSGGGGSGGGGSDIQLTQSPSFMSASVGDRVTITCRASQNVGTAVAWYQQKPGQAPKLLIYSASNRYTGVPSRFSGSGSGTEFTLTISSLQSEDFATYYCQQYTNYPMYTFGQGTKLEIK

SEQ ID NO: 1691 - DNA, 741 bp, synthetic construct
  misc_feature 1..741: note = EN01D5-HL
  source 1..741: mol_type = other DNA
caggtgcagctggtccagtcaggacctgaggtgatgaagcctggggcttcagtgaagatgtcctgcaaggcttctggatacacattcactgactatgttatacactgggtgaggcaggcacctggaaagcgccttgagtggatgggatatattaatccttatgatgatgatactacctacaaccagaagttcaagggccgggtcacaattactgtagacaaatccgccagcacagcctacatggaactcaacagcctgacatctgaggacactgcagtctattactgtgcaagaagggggaactcctatgatggttacttcgactattctatggactactggggtcaaggaaccttggtcaccgtctcctcaggtggtggtggttctggcggcggcggctccggtggtggtggttctgacatccagctgacccagtctccaagcttcatgtccgcatcagtaggagacagagtcaccatcacctgcagggccagtcagaatgtgggtactgctgtagcctggtatcaacagaaaccaggacaagcccctaaattactgatttactcggcatcgaatcggtacactggagtccctagtcgcttctcaggcagtggatctgggacagagttcactctcaccatcagcagtctgcagtctgaagacttcgcaacttattactgccagcaatataccaactatcccatgtatacgtttggacaggggaccaagctggaaataaaa

SEQ ID NO: 1692 - protein, 502 aa, synthetic construct
  REGION 1..502: note = EN01D5 HL x I2C HL
QVQLVQSGPEVMKPGASVKMSCKASGYTFTDYVIHWVRQAPGKRLEWMGYINPYDDDTTYNQKFKGRVTITVDKSASTAYMELNSLTSEDTAVYYCARRGNSYDGYFDYSMDYWGQGTLVTVSSGGGGSGGGGSGGGGSDIQLTQSPSFMSASVGDRVTITCRASQNVGTAVAWYQQKPGQAPKLLIYSASNRYTGVPSRFSGSGSGTEFTLTISSLQSEDFATYYCQQYTNYPMYTFGQGTKLEIKSGGGGSEVQLVESGGGLVQPGGSLKLSCAASGFTFNKYAMNWVRQAPGKGLEWVARIRSKYNNYATYYADSVKDRFTISRDDSKNTAYLQMNNLKTEDTAVYYCVRHGNFGNSYISYWAYWGQGTLVTVSSGGGGSGGGGSGGGGSQTVVTQEPSLTVSPGGTVTLTCGSSTGAVTSGNYPNWVQQKPGQAPRGLIGGTKFLAPGTPARFSGSLLGGKAALTLSGVQPEDEAEYYCVLWYSNRWVFGGGTKLTVL

SEQ ID NO: 1693 - DNA, 1506 bp, synthetic construct
  misc_feature 1..1506: note = EN01D5 HL x I2C HL
  source 1..1506: mol_type = other DNA
caggtgcagctggtccagtcaggacctgaggtgatgaagcctggggcttcagtgaagatgtcctgcaaggcttctggatacacattcactgactatgttatacactgggtgaggcaggcacctggaaagcgccttgagtggatgggatatattaatccttatgatgatgatactacctacaaccagaagttcaagggccgggtcacaattactgtagacaaatccgccagcacagcctacatggaactcaacagcctgacatctgaggacactgcagtctattactgtgcaagaagggggaactcctatgatggttacttcgactattctatggactactggggtcaaggaaccttggtcaccgtctcctcaggtggtggtggttctggcggcggcggctccggtggtggtggttctgacatccagctgacccagtctccaagcttcatgtccgcatcagtaggagacagagtcaccatcacctgcagggccagtcagaatgtgggtactgctgtagcctggtatcaacagaaaccaggacaagcccctaaattactgatttactcggcatcgaatcggtacactggagtccctagtcgcttctcaggcagtggatctgggacagagttcactctcaccatcagcagtctgcagtctgaagacttcgcaacttattactgccagcaatataccaactatcccatgtatacgtttggacaggggaccaagctggaaataaaatccggaggtggtggatccgaggtgcagctggtcgagtctggaggaggattggtgcagcctggagggtcattgaaactctcatgtgcagcctctggattcaccttcaataagtacgccatgaactgggtccgccaggctccaggaaagggtttggaatgggttgctcgcataagaagtaaatataataattatgcaacatattatgccgattcagtgaaagacaggttcaccatctccagagatgattcaaaaaacactgcctatctacaaatgaacaacttgaaaactgaggacactgccgtgtactactgtgtgagacatgggaacttcggtaatagctacatatcctactgggcttactggggccaagggactctggtcaccgtctcctcaggtggtggtggttctggcggcggcggctccggtggtggtggttctcagactgttgtgactcaggaaccttcactcaccgtatcacctggtggaacagtcacactcacttgtggctcctcgactggggctgttacatctggcaactacccaaactgggtccaacaaaaaccaggtcaggcaccccgtggtctaataggtgggactaagttcctcgcccccggtactcctgccagattctcaggctccctgcttggaggcaaggctgccctcaccctctcaggggtacagccagaggatgaggcagaatattactgtgttctatggtacagcaaccgctgggtgttcggtggaggaaccaaactgactgtccta

SEQ ID NO: 1694 - protein, 124 aa, synthetic construct
  REGION 1..124: note = EN00E4-H
QVQLVQSGPEVKKPGASVKLSCKASGYTFTDYVIHWMRQAPGQRLEWMGYINPYDDDTTYNQKFKGRVTITLDTSASTAYMELNSLRSEDTAVYYCARRGNSYDGYFDYSMDYWGQGTLVTVSS

SEQ ID NO: 1695 - protein, 5 aa, synthetic construct
  REGION 1..5: note = EN00E4-HCDR1
DYVIH

SEQ ID NO: 1696 - protein, 17 aa, synthetic construct
  REGION 1..17: note = EN00E4-HCDR2
YINPYDDDTTYNQKFKG

SEQ ID NO: 1697 - protein, 15 aa, synthetic construct
  REGION 1..15: note = EN00E4-HCDR3
RGNSYDGYFDYSMDY

SEQ ID NO: 1698 - DNA, 372 bp, synthetic construct
  misc_feature 1..372: note = EN00E4-H
  source 1..372: mol_type = other DNA
caggtgcagctggtccagtcaggacctgaggtgaagaagcctggggcttcagtgaagttgtcctgcaaggcttctggatacacattcactgactatgttatacactggatgaggcaggcacctggacagcgccttgagtggatgggatatattaatccttatgatgatgatactacctacaaccagaagttcaagggccgggtcacaattactctagacacatccgccagcacagcctacatggaactcaacagcctgagatctgaggacactgcagtctattactgtgcaagaagggggaactcctatgatggttacttcgactattctatggactactggggtcaaggaaccttggtcaccgtctcctca

SEQ ID NO: 1699 - protein, 108 aa, synthetic construct
  REGION 1..108: note = EN00E4-L
DIQLTQSPKFMSTSVGDKVTITCRASQNVGTAVAWYQQKPGKAPKLLIYSASNRYTGVPSRFSGSGSGTEFTLTISSLQPEDFANYFCQQYTNYPMYTFGQGTKLEIK

SEQ ID NO: 1700 - protein, 11 aa, synthetic construct
  REGION 1..11: note = EN00E4-LCDR1
RASQNVGTAVA

SEQ ID NO: 1701 - protein, 7 aa, synthetic construct
  REGION 1..7: note = EN00E4-LCDR2
SASNRYT

SEQ ID NO: 1702 - protein, 10 aa, synthetic construct
  REGION 1..10: note = EN00E4-LCDR3
QQYTNYPMYT

SEQ ID NO: 1703 - DNA, 324 bp, synthetic construct
  misc_feature 1..324: note = EN00E4-L
  source 1..324: mol_type = other DNA
gacatccagctgacccagtctccaaaattcatgtccacatcagtaggagacaaagtcaccatcacctgcagggccagtcagaatgtgggtactgctgtagcctggtatcaacagaaaccaggaaaagcccctaaattactgatttactcggcatcgaatcggtacactggagtccctagtcgcttctcaggcagtggatctgggacagagttcactctcaccatcagcagtctgcagcctgaagacttcgcaaattatttctgccagcaatataccaactatcccatgtatacgtttggacaggggaccaagctggaaataaaa

SEQ ID NO: 1704 - protein, 247 aa, synthetic construct
  REGION 1..247: note = EN00E4-HL
QVQLVQSGPEVKKPGASVKLSCKASGYTFTDYVIHWMRQAPGQRLEWMGYINPYDDDTTYNQKFKGRVTITLDTSASTAYMELNSLRSEDTAVYYCARRGNSYDGYFDYSMDYWGQGTLVTVSSGGGGSGGGGSGGGGSDIQLTQSPKFMSTSVGDKVTITCRASQNVGTAVAWYQQKPGKAPKLLIYSASNRYTGVPSRFSGSGSGTEFTLTISSLQPEDFANYFCQQYTNYPMYTFGQGTKLEIK

SEQ ID NO: 1705 - DNA, 741 bp, synthetic construct
  misc_feature 1..741: note = EN00E4-HL
  source 1..741: mol_type = other DNA
caggtgcagctggtccagtcaggacctgaggtgaagaagcctggggcttcagtgaagttgtcctgcaaggcttctggatacacattcactgactatgttatacactggatgaggcaggcacctggacagcgccttgagtggatgggatatattaatccttatgatgatgatactacctacaaccagaagttcaagggccgggtcacaattactctagacacatccgccagcacagcctacatggaactcaacagcctgagatctgaggacactgcagtctattactgtgcaagaagggggaactcctatgatggttacttcgactattctatggactactggggtcaaggaaccttggtcaccgtctcctcaggtggtggtggttctggcggcggcggctccggtggtggtggttctgacatccagctgacccagtctccaaaattcatgtccacatcagtaggagacaaagtcaccatcacctgcagggccagtcagaatgtgggtactgctgtagcctggtatcaacagaaaccaggaaaagcccctaaattactgatttactcggcatcgaatcggtacactggagtccctagtcgcttctcaggcagtggatctgggacagagttcactctcaccatcagcagtctgcagcctgaagacttcgcaaattatttctgccagcaatataccaactatcccatgtatacgtttggacaggggaccaagctggaaataaaa

SEQ ID NO: 1706 - protein, 502 aa, synthetic construct
  REGION 1..502: note = EN00E4 HL x I2C HL
QVQLVQSGPEVKKPGASVKLSCKASGYTFTDYVIHWMRQAPGQRLEWMGYINPYDDDTTYNQKFKGRVTITLDTSASTAYMELNSLRSEDTAVYYCARRGNSYDGYFDYSMDYWGQGTLVTVSSGGGGSGGGGSGGGGSDIQLTQSPKFMSTSVGDKVTITCRASQNVGTAVAWYQQKPGKAPKLLIYSASNRYTGVPSRFSGSGSGTEFTLTISSLQPEDFANYFCQQYTNYPMYTFGQGTKLEIKSGGGGSEVQLVESGGGLVQPGGSLKLSCAASGFTFNKYAMNWVRQAPGKGLEWVARIRSKYNNYATYYADSVKDRFTISRDDSKNTAYLQMNNLKTEDTAVYYCVRHGNFGNSYISYWAYWGQGTLVTVSSGGGGSGGGGSGGGGSQTVVTQEPSLTVSPGGTVTLTCGSSTGAVTSGNYPNWVQQKPGQAPRGLIGGTKFLAPGTPARFSGSLLGGKAALTLSGVQPEDEAEYYCVLWYSNRWVFGGGTKLTVL

SEQ ID NO: 1707 - DNA, 1506 bp, synthetic construct
  misc_feature 1..1506: note = EN00E4 HL x I2C HL
  source 1..1506: mol_type = other DNA
caggtgcagctggtccagtcaggacctgaggtgaagaagcctggggcttcagtgaagttgtcctgcaaggcttctggatacacattcactgactatgttatacactggatgaggcaggcacctggacagcgccttgagtggatgggatatattaatccttatgatgatgatactacctacaaccagaagttcaagggccgggtcacaattactctagacacatccgccagcacagcctacatggaactcaacagcctgagatctgaggacactgcagtctattactgtgcaagaagggggaactcctatgatggttacttcgactattctatggactactggggtcaaggaaccttggtcaccgtctcctcaggtggtggtggttctggcggcggcggctccggtggtggtggttctgacatccagctgacccagtctccaaaattcatgtccacatcagtaggagacaaagtcaccatcacctgcagggccagtcagaatgtgggtactgctgtagcctggtatcaacagaaaccaggaaaagcccctaaattactgatttactcggcatcgaatcggtacactggagtccctagtcgcttctcaggcagtggatctgggacagagttcactctcaccatcagcagtctgcagcctgaagacttcgcaaattatttctgccagcaatataccaactatcccatgtatacgtttggacaggggaccaagctggaaataaaatccggaggtggtggatccgaggtgcagctggtcgagtctggaggaggattggtgcagcctggagggtcattgaaactctcatgtgcagcctctggattcaccttcaataagtacgccatgaactgggtccgccaggctccaggaaagggtttggaatgggttgctcgcataagaagtaaatataataattatgcaacatattatgccgattcagtgaaagacaggttcaccatctccagagatgattcaaaaaacactgcctatctacaaatgaacaacttgaaaactgaggacactgccgtgtactactgtgtgagacatgggaacttcggtaatagctacatatcctactgggcttactggggccaagggactctggtcaccgtctcctcaggtggtggtggttctggcggcggcggctccggtggtggtggttctcagactgttgtgactcaggaaccttcactcaccgtatcacctggtggaacagtcacactcacttgtggctcctcgactggggctgttacatctggcaactacccaaactgggtccaacaaaaaccaggtcaggcaccccgtggtctaataggtgggactaagttcctcgcccccggtactcctgccagattctcaggctccctgcttggaggcaaggctgccctcaccctctcaggggtacagccagaggatgaggcagaatattactgtgttctatggtacagcaaccgctgggtgttcggtggaggaaccaaactgactgtccta

SEQ ID NO: 1708 - protein, 124 aa, synthetic construct
  REGION 1..124: note = En00F7-H
QVQLVQSGPEVKKPGASVKLSCKASGYTFTDYVIHWVKQAPGQRLEWMGYINPYDDDTTYNQKFKGQVTITVDTSASTAYMELNSLRSEDTAVYYCARRGNSYDGYFDYSMDYWGQGTLVTVSS

SEQ ID NO: 1709 - protein, 5 aa, synthetic construct
  REGION 1..5: note = EN00F7-HCDR1
DYVIH

SEQ ID NO: 1710 - protein, 17 aa, synthetic construct
  REGION 1..17: note = EN00F7-HCDR2
YINPYDDDTTYNQKFKG

SEQ ID NO: 1711 - protein, 15 aa, synthetic construct
  REGION 1..15: note = EN00F7-HCDR3
RGNSYDGYFDYSMDY

SEQ ID NO: 1712 - DNA, 372 bp, synthetic construct
  misc_feature 1..372: note = EN00F7-H
  source 1..372: mol_type = other DNA
caggtgcagctggtccagtcaggacctgaggtgaagaagcctggggcttcagtgaagttgtcctgcaaggcttctggatacacattcactgactatgttatacactgggtgaagcaggcacctggacagcgccttgagtggatgggatatattaatccttatgatgatgatactacctacaaccagaagttcaagggccaggtcacaattactgtagacacatccgccagcacagcctacatggaactcaacagcctgagatctgaggacactgcagtctattactgtgcaagaagggggaactcctatgatggttacttcgactattctatggactactggggtcaaggaaccttggtcaccgtctcctca

SEQ ID NO: 1713 - protein, 108 aa, synthetic construct
  REGION 1..108: note = EN00F7-L
DIQLTQSPSFLSASVGDRVTITCRASQNVGTAVAWYQQKPGKAPKLLIYSASNRYTGVPSRFSGSGSGTEFTLTISSMQPEDLATYFCQQYTNYPMYTFGQGTKLEIK

SEQ ID NO: 1714 - protein, 11 aa, synthetic construct
  REGION 1..11: note = EN00F7-LCDR1
RASQNVGTAVA

SEQ ID NO: 1715 - protein, 7 aa, synthetic construct
  REGION 1..7: note = EN00F7-LCDR2
SASNRYT

SEQ ID NO: 1716 - protein, 10 aa, synthetic construct
  REGION 1..10: note = EN00F7-LCDR3
QQYTNYPMYT

SEQ ID NO: 1717 - DNA, 324 bp, synthetic construct
  misc_feature 1..324: note = EN00F7-L
  source 1..324: mol_type = other DNA
gacatccagctgacccagtctccaagcttcctgtccgcatcagtaggagacagagtcaccatcacctgcagggccagtcagaatgtgggtactgctgtagcctggtatcaacagaaaccaggaaaagcccctaaattactgatttactcggcatcgaatcggtacactggagtccctagtcgcttctcaggcagtggatctgggacagagttcactctcaccatcagcagtatgcagcctgaagacctcgcaacttatttctgccagcaatataccaactatcccatgtatacgtttggacaggggaccaagctggaaataaaa

SEQ ID NO: 1718 - protein, 247 aa, synthetic construct
  REGION 1..247: note = EN00F7-HL
QVQLVQSGPEVKKPGASVKLSCKASGYTFTDYVIHWVKQAPGQRLEWMGYINPYDDDTTYNQKFKGQVTITVDTSASTAYMELNSLRSEDTAVYYCARRGNSYDGYFDYSMDYWGQGTLVTVSSGGGGSGGGGSGGGGSDIQLTQSPSFLSASVGDRVTITCRASQNVGTAVAWYQQKPGKAPKLLIYSASNRYTGVPSRFSGSGSGTEFTLTISSMQPEDLATYFCQQYTNYPMYTFGQGTKLEIK

SEQ ID NO: 1719 - DNA, 741 bp, synthetic construct
  misc_feature 1..741: note = EN00F7-HL
  source 1..741: mol_type = other DNA
caggtgcagctggtccagtcaggacctgaggtgaagaagcctggggcttcagtgaagttgtcctgcaaggcttctggatacacattcactgactatgttatacactgggtgaagcaggcacctggacagcgccttgagtggatgggatatattaatccttatgatgatgatactacctacaaccagaagttcaagggccaggtcacaattactgtagacacatccgccagcacagcctacatggaactcaacagcctgagatctgaggacactgcagtctattactgtgcaagaagggggaactcctatgatggttacttcgactattctatggactactggggtcaaggaaccttggtcaccgtctcctcaggtggtggtggttctggcggcggcggctccggtggtggtggttctgacatccagctgacccagtctccaagcttcctgtccgcatcagtaggagacagagtcaccatcacctgcagggccagtcagaatgtgggtactgctgtagcctggtatcaacagaaaccaggaaaagcccctaaattactgatttactcggcatcgaatcggtacactggagtccctagtcgcttctcaggcagtggatctgggacagagttcactctcaccatcagcagtatgcagcctgaagacctcgcaacttatttctgccagcaatataccaactatcccatgtatacgtttggacaggggaccaagctggaaataaaa

SEQ ID NO: 1720 - protein, 502 aa, synthetic construct
  REGION 1..502: note = En00F7 HL x I2C HL
QVQLVQSGPEVKKPGASVKLSCKASGYTFTDYVIHWVKQAPGQRLEWMGYINPYDDDTTYNQKFKGQVTITVDTSASTAYMELNSLRSEDTAVYYCARRGNSYDGYFDYSMDYWGQGTLVTVSSGGGGSGGGGSGGGGSDIQLTQSPSFLSASVGDRVTITCRASQNVGTAVAWYQQKPGKAPKLLIYSASNRYTGVPSRFSGSGSGTEFTLTISSMQPEDLATYFCQQYTNYPMYTFGQGTKLEIKSGGGGSEVQLVESGGGLVQPGGSLKLSCAASGFTFNKYAMNWVRQAPGKGLEWVARIRSKYNNYATYYADSVKDRFTISRDDSKNTAYLQMNNLKTEDTAVYYCVRHGNFGNSYISYWAYWGQGTLVTVSSGGGGSGGGGSGGGGSQTVVTQEPSLTVSPGGTVTLTCGSSTGAVTSGNYPNWVQQKPGQAPRGLIGGTKFLAPGTPARFSGSLLGGKAALTLSGVQPEDEAEYYCVLWYSNRWVFGGGTKLTVL

SEQ ID NO: 1721 - DNA, 1506 bp, synthetic construct
  misc_feature 1..1506: note = En00F7 HL x I2C HL
  source 1..1506: mol_type = other DNA
caggtgcagctggtccagtcaggacctgaggtgaagaagcctggggcttcagtgaagttgtcctgcaaggcttctggatacacattcactgactatgttatacactgggtgaagcaggcacctggacagcgccttgagtggatgggatatattaatccttatgatgatgatactacctacaaccagaagttcaagggccaggtcacaattactgtagacacatccgccagcacagcctacatggaactcaacagcctgagatctgaggacactgcagtctattactgtgcaagaagggggaactcctatgatggttacttcgactattctatggactactggggtcaaggaaccttggtcaccgtctcctcaggtggtggtggttctggcggcggcggctccggtggtggtggttctgacatccagctgacccagtctccaagcttcctgtccgcatcagtaggagacagagtcaccatcacctgcagggccagtcagaatgtgggtactgctgtagcctggtatcaacagaaaccaggaaaagcccctaaattactgatttactcggcatcgaatcggtacactggagtccctagtcgcttctcaggcagtggatctgggacagagttcactctcaccatcagcagtatgcagcctgaagacctcgcaacttatttctgccagcaatataccaactatcccatgtatacgtttggacaggggaccaagctggaaataaaatccggaggtggtggatccgaggtgcagctggtcgagtctggaggaggattggtgcagcctggagggtcattgaaactctcatgtgcagcctctggattcaccttcaataagtacgccatgaactgggtccgccaggctccaggaaagggtttggaatgggttgctcgcataagaagtaaatataataattatgcaacatattatgccgattcagtgaaagacaggttcaccatctccagagatgattcaaaaaacactgcctatctacaaatgaacaacttgaaaactgaggacactgccgtgtactactgtgtgagacatgggaacttcggtaatagctacatatcctactgggcttactggggccaagggactctggtcaccgtctcctcaggtggtggtggttctggcggcggcggctccggtggtggtggttctcagactgttgtgactcaggaaccttcactcaccgtatcacctggtggaacagtcacactcacttgtggctcctcgactggggctgttacatctggcaactacccaaactgggtccaacaaaaaccaggtcaggcaccccgtggtctaataggtgggactaagttcctcgcccccggtactcctgccagattctcaggctccctgcttggaggcaaggctgccctcaccctctcaggggtacagccagaggatgaggcagaatattactgtgttctatggtacagcaaccgctgggtgttcggtggaggaaccaaactgactgtccta

SEQ ID NO: 1722 - protein, 124 aa, synthetic construct
  REGION 1..124: note = EN00H6-H
QVQLVQSGAEVKKPGASVKLSCKASGYTFTDYVIHWVRQTPGQRLEWMGYINPYDDDTTYNQKFKGRVTITGDTSANTAYMELNSLTSEDTAVYYCARRGNSYDGYFDYSMDYWGQGTLVTVSS

SEQ ID NO: 1723 - protein, 5 aa, synthetic construct
  REGION 1..5: note = EN00H6-HCDR1
DYVIH

SEQ ID NO: 1724 - protein, 17 aa, synthetic construct
  REGION 1..17: note = EN00H6-HCDR2
YINPYDDDTTYNQKFKG

SEQ ID NO: 1725 - protein, 15 aa, synthetic construct
  REGION 1..15: note = EN00H6-HCDR3
RGNSYDGYFDYSMDY

SEQ ID NO: 1726 - DNA, 372 bp, synthetic construct
  misc_feature 1..372: note = EN00H6-H
  source 1..372: mol_type = other DNA
caggtgcagctggtccagtcaggagctgaggtgaagaagcctggggcttcagtgaagttgtcctgcaaggcttctggatacacattcactgactatgttatacactgggtgaggcagacacctggacagcgtcttgagtggatgggatatattaatccttatgatgatgatactacctacaaccagaagttcaagggccgggtcacaattactggagacacatccgccaacacagcctacatggaactcaacagcctgacatctgaggacactgcagtctattactgtgcaagaagggggaactcctatgatggttacttcgactattctatggactactggggtcaaggaaccttggtcaccgtctcctca

SEQ ID NO: 1727 - protein, 108 aa, synthetic construct
  REGION 1..108: note = EN00H6-L
DIQLTQSPSFLSASVGDRVTITCRASQNVGTAVAWYQQKPGKAPKLLIYSASNRYTGVPSRFSGSGSGTEFTLTISSLQSEDLATYYCQQYTNYPMYTFGQGTKLEIK

SEQ ID NO: 1728 - protein, 11 aa, synthetic construct
  REGION 1..11: note = EN00H6-LCDR1
RASQNVGTAVA

SEQ ID NO: 1729 - protein, 7 aa, synthetic construct
  REGION 1..7: note = EN00H6-LCDR2
SASNRYT

SEQ ID NO: 1730 - protein, 10 aa, synthetic construct
  REGION 1..10: note = EN00H6-LCDR3
QQYTNYPMYT

SEQ ID NO: 1731 - DNA, 324 bp, synthetic construct
  misc_feature 1..324: note = EN00H6-L
  source 1..324: mol_type = other DNA
gacatccagctgacccagtctccaagcttcctgtccgcatcagtaggagacagagtcaccatcacctgcagggccagtcagaatgtgggtactgctgtagcctggtatcaacagaaaccaggaaaagcccctaaattactgatttactcggcatcgaatcggtacactggagtccctagtcgcttctcaggcagtggatctgggacagagttcactctcaccatcagcagtctgcagtctgaagacctcgcaacttattactgccagcaatataccaactatcccatgtatacgtttggacaggggaccaagctggaaataaaa

SEQ ID NO: 1732 - protein, 247 aa, synthetic construct
  REGION 1..247: note = EN00H6-HL
QVQLVQSGAEVKKPGASVKLSCKASGYTFTDYVIHWVRQTPGQRLEWMGYINPYDDDTTYNQKFKGRVTITGDTSANTAYMELNSLTSEDTAVYYCARRGNSYDGYFDYSMDYWGQGTLVTVSSGGGGSGGGGSGGGGSDIQLTQSPSFLSASVGDRVTITCRASQNVGTAVAWYQQKPGKAPKLLIYSASNRYTGVPSRFSGSGSGTEFTLTISSLQSEDLATYYCQQYTNYPMYTFGQGTKLEIK

SEQ ID NO: 1733 - DNA, 741 bp, synthetic construct
  misc_feature 1..741: note = EN00H6-HL
  source 1..741: mol_type = other DNA
caggtgcagctggtccagtcaggagctgaggtgaagaagcctggggcttcagtgaagttgtcctgcaaggcttctggatacacattcactgactatgttatacactgggtgaggcagacacctggacagcgtcttgagtggatgggatatattaatccttatgatgatgatactacctacaaccagaagttcaagggccgggtcacaattactggagacacatccgccaacacagcctacatggaactcaacagcctgacatctgaggacactgcagtctattactgtgcaagaagggggaactcctatgatggttacttcgactattctatggactactggggtcaaggaaccttggtcaccgtctcctcaggtggtggtggttctggcggcggcggctccggtggtggtggttctgacatccagctgacccagtctccaagcttcctgtccgcatcagtaggagacagagtcaccatcacctgcagggccagtcagaatgtgggtactgctgtagcctggtatcaacagaaaccaggaaaagcccctaaattactgatttactcggcatcgaatcggtacactggagtccctagtcgcttctcaggcagtggatctgggacagagttcactctcaccatcagcagtctgcagtctgaagacctcgcaacttattactgccagcaatataccaactatcccatgtatacgtttggacaggggaccaagctggaaataaaa

SEQ ID NO: 1734 - protein, 502 aa, synthetic construct
  REGION 1..502: note = EN00H6 HL x I2C HL
QVQLVQSGAEVKKPGASVKLSCKASGYTFTDYVIHWVRQTPGQRLEWMGYINPYDDDTTYNQKFKGRVTITGDTSANTAYMELNSLTSEDTAVYYCARRGNSYDGYFDYSMDYWGQGTLVTVSSGGGGSGGGGSGGGGSDIQLTQSPSFLSASVGDRVTITCRASQNVGTAVAWYQQKPGKAPKLLIYSASNRYTGVPSRFSGSGSGTEFTLTISSLQSEDLATYYCQQYTNYPMYTFGQGTKLEIKSGGGGSEVQLVESGGGLVQPGGSLKLSCAASGFTFNKYAMNWVRQAPGKGLEWVARIRSKYNNYATYYADSVKDRFTISRDDSKNTAYLQMNNLKTEDTAVYYCVRHGNFGNSYISYWAYWGQGTLVTVSSGGGGSGGGGSGGGGSQTVVTQEPSLTVSPGGTVTLTCGSSTGAVTSGNYPNWVQQKPGQAPRGLIGGTKFLAPGTPARFSGSLLGGKAALTLSGVQPEDEAEYYCVLWYSNRWVFGGGTKLTVL

SEQ ID NO: 1735 - DNA, 1506 bp, synthetic construct
  misc_feature 1..1506: note = EN00H6 HL x I2C HL
  source 1..1506: mol_type = other DNA
caggtgcagctggtccagtcaggagctgaggtgaagaagcctggggcttcagtgaagttgtcctgcaaggcttctggatacacattcactgactatgttatacactgggtgaggcagacacctggacagcgtcttgagtggatgggatatattaatccttatgatgatgatactacctacaaccagaagttcaagggccgggtcacaattactggagacacatccgccaacacagcctacatggaactcaacagcctgacatctgaggacactgcagtctattactgtgcaagaagggggaactcctatgatggttacttcgactattctatggactactggggtcaaggaaccttggtcaccgtctcctcaggtggtggtggttctggcggcggcggctccggtggtggtggttctgacatccagctgacccagtctccaagcttcctgtccgcatcagtaggagacagagtcaccatcacctgcagggccagtcagaatgtgggtactgctgtagcctggtatcaacagaaaccaggaaaagcccctaaattactgatttactcggcatcgaatcggtacactggagtccctagtcgcttctcaggcagtggatctgggacagagttcactctcaccatcagcagtctgcagtctgaagacctcgcaacttattactgccagcaatataccaactatcccatgtatacgtttggacaggggaccaagctggaaataaaatccggaggtggtggatccgaggtgcagctggtcgagtctggaggaggattggtgcagcctggagggtcattgaaactctcatgtgcagcctctggattcaccttcaataagtacgccatgaactgggtccgccaggctccaggaaagggtttggaatgggttgctcgcataagaagtaaatataataattatgcaacatattatgccgattcagtgaaagacaggttcaccatctccagagatgattcaaaaaacactgcctatctacaaatgaacaacttgaaaactgaggacactgccgtgtactactgtgtgagacatgggaacttcggtaatagctacatatcctactgggcttactggggccaagggactctggtcaccgtctcctcaggtggtggtggttctggcggcggcggctccggtggtggtggttctcagactgttgtgactcaggaaccttcactcaccgtatcacctggtggaacagtcacactcacttgtggctcctcgactggggctgttacatctggcaactacccaaactgggtccaacaaaaaccaggtcaggcaccccgtggtctaataggtgggactaagttcctcgcccccggtactcctgccagattctcaggctccctgcttggaggcaaggctgccctcaccctctcaggggtacagccagaggatgaggcagaatattactgtgttctatggtacagcaaccgctgggtgttcggtggaggaaccaaactgactgtccta

SEQ ID NO: 1736 - protein, 119 aa, synthetic construct; identical to SEQ ID NO: 1015
  REGION 1..119: note = hEp14G6-H

SEQ ID NO: 1737 - protein, 5 aa, synthetic construct
  REGION 1..5: note = hEp14G6-HCDR1
NYWLG

SEQ ID NO: 1738 - protein, 17 aa, synthetic construct
  REGION 1..17: note = hEp14G6-HCDR2
DIFPGSGNIHYNEKFKG

SEQ ID NO: 1739 - protein, 10 aa, synthetic construct
  REGION 1..10: note = hEp14G6-HCDR3
LRNWDEPMDY

SEQ ID NO: 1740 - DNA, 357 bp, synthetic construct; identical to SEQ ID NO: 1019
  misc_feature 1..357: note = hEp14G6-H
  source 1..357: mol_type = other DNA

SEQ ID NO: 1741 - protein, 113 aa, synthetic construct; identical to SEQ ID NO: 1010
  REGION 1..113: note = hEp14G6-L

SEQ ID NO: 1742 - protein, 17 aa, synthetic construct
  REGION 1..17: note = HEP14G6-LCDR1
KSSQSLLNSGNQKNYLT

SEQ ID NO: 1743 - protein, 7 aa, synthetic construct
  REGION 1..7: note = HEP14G6-LCDR2
WASTRES

SEQ ID NO: 1744 - protein, 9 aa, synthetic construct
  REGION 1..9: note = HEP14G6-LCDR3
QNDYSYPLT

SEQ ID NO: 1745 - DNA, 339 bp, synthetic construct; identical to SEQ ID NO: 1014
  misc_feature 1..339: note = HEP14G6-L
  source 1..339: mol_type = other DNA

SEQ ID NO: 1746 - protein, 247 aa, synthetic construct
  REGION 1..247: note = HEP14G6-LH
DIVMTQTPLSLTVTPGEPVSISCKSSQSLLNSGNQKNYLTWYLQKPGQPPQLLIYWASTRESGVPDRFSGSGSGTDFTLKISRVQAEDVGVYYCQNDYSYPLTFGQGTKLEIKGGGGSGGGGSGGGGSQVQLVQSGAEVKKPGSSVKVSCKASGYTFSNYWLGWVRQAPGQGLEWMGDIFPGSGNIHYNEKFKGRATITADKSTSTAYMELSSLTSEDTAVYYCARLRNWDEPMDYWGQGTTVTVSS

SEQ ID NO: 1747 - DNA, 741 bp, synthetic construct
  misc_feature 1..741: note = HEP14G6-LH
  source 1..741: mol_type = other DNA
gacatcgtgatgacacagactccactctccctgactgtgacaccaggagagccggtctctatcagctgcaagtccagtcagagtctgttaaacagtggaaatcaaaagaactacttgacctggtacctgcagaaaccagggcagcctcctcaactgttgatctactgggcatccactagggaatctggggtccctgatcgcttctcaggcagtggatctggaacagatttcactctcaaaatcagccgtgtgcaggctgaagacgtgggagtttattactgtcagaatgattatagttatccgctcacgttcggtcaagggaccaagcttgagatcaaaggtggtggtggttctggcggcggcggctccggtggtggtggttctcaggtgcagctggtccagtctggagctgaggtgaaaaagcctgggtcttcagtgaaggtatcctgcaaggcttctggatacaccttctctaactactggctaggttgggtaaggcaggcgcctggacagggacttgagtggatgggagatattttccctggaagtggtaatatccactacaatgagaagttcaagggcagagccacaatcactgcagacaaatctacgagcacagcctatatggaactcagtagcctgacatctgaggacactgctgtctattactgtgcaagactgaggaactgggacgagcctatggactactggggccaagggaccacggtcaccgtctcctcc

SEQ ID NO: 1748 - protein, 501 aa, synthetic construct; identical to SEQ ID NO: 1020
  REGION 1..501: note = hEp14G6 LH x I2C HL

SEQ ID NO: 1749 - DNA, 1503 bp, synthetic construct; identical to SEQ ID NO: 1021
  misc_feature 1..1503: note = hEp14G6 LH x I2C HL
  source 1..1503: mol_type = other DNA

SEQ ID NO: 1750 - protein, 119 aa, synthetic construct; identical to SEQ ID NO: 967
  REGION 1..119: note = HEP14D2-H

SEQ ID NO: 1751 - protein, 5 aa, synthetic construct
  REGION 1..5: note = HEP14D2-HCDR1
NYWLG

SEQ ID NO: 1752 - protein, 17 aa, synthetic construct
  REGION 1..17: note = HEP14D2-HCDR2
DIFPGSGNIHYNEKFKG

SEQ ID NO: 1753 - protein, 10 aa, synthetic construct
  REGION 1..10: note = HEP14D2-HCDR3
LRNWDEPMDY

SEQ ID NO: 1754 - DNA, 357 bp, synthetic construct; identical to SEQ ID NO: 971
  misc_feature 1..357: note = HEP14D2-H
  source 1..357: mol_type = other DNA

SEQ ID NO: 1755 - protein, 113 aa, synthetic construct; identical to SEQ ID NO: 962
  REGION 1..113: note = HEP14D2-L

SEQ ID NO: 1756 - protein, 17 aa, synthetic construct
  REGION 1..17: note = HEP14D2-LCDR1
KSSQSLLNSGNQKNYLT

SEQ ID NO: 1757 - protein, 7 aa, synthetic construct
  REGION 1..7: note = HEP14D2-LCDR2
WASTRES

SEQ ID NO: 1758 - protein, 9 aa, synthetic construct
  REGION 1..9: note = HEP14D2-LCDR3
QNDYSYPLT

SEQ ID NO: 1759 - DNA, 339 bp, synthetic construct; identical to SEQ ID NO: 966
  misc_feature 1..339: note = HEP14D2-L
  source 1..339: mol_type = other DNA

SEQ ID NO: 1760 - protein, 247 aa, synthetic construct
  REGION 1..247: note = HEP14D2-LH
DIVMTQTPLSLPVTPGEQVSISCKSSQSLLNSGNQKNYLTWYQQKPGQSPQLLIYWASTRESGVPDRFSGSGSGTDFTLKISRVEAEDVGVYYCQNDYSYPLTFGQGTKLEIKGGGGSGGGGSGGGGSQVQLVQSGAEVKKPGSSVKVSCKASGYTFSNYWLGWVRQAPGQGLEWMGDIFPGSGNIHYNEKFKGRVTITADKSTSTAYMELSSLTSEDTAVYYCARLRNWDEPMDYWGQGTTVTVSS

SEQ ID NO: 1761 - DNA, 741 bp, synthetic construct
  misc_feature 1..741: note = HEP14D2-LH
  source 1..741: mol_type = other DNA
gacatcgtgatgacacagactccactctccctgcctgtgacaccaggagagcaggtctctatcagctgcaagtccagtcagagtctgttaaacagtggaaatcaaaagaactacttgacctggtaccagcagaaaccagggcagtctcctcaactgttgatctactgggcatccactagggaatctggggtccctgatcgcttctcaggcagtggatctggaacagatttcactctcaaaatcagccgtgtggaggctgaagacgtgggagtttattactgtcagaatgattatagttatccgctcacgttcggtcaagggaccaagcttgagatcaaaggtggtggtggttctggcggcggcggctccggtggtggtggttctcaggtgcagctggtccagtctggagctgaggtgaaaaagcctgggtcttcagtgaaggtatcctgcaaggcttctggatacaccttctctaactactggctaggttgggtaaggcaggcgcctggacagggacttgagtggatgggagatattttccctggaagtggtaatatccactacaatgagaagttcaagggcagagtcacaatcactgcagacaaatctacgagcacagcctatatggaactcagtagcctgacatctgaggacactgctgtctattactgtgcaagactgaggaactgggacgagcctatggactactggggccaagggaccacggtcaccgtctcctcc

SEQ ID NO: 1762 - protein, 501 aa, synthetic construct; identical to SEQ ID NO: 972
  REGION 1..501: note = hEp14D2 LH x I2C HL

SEQ ID NO: 1763 - DNA, 1503 bp, synthetic construct; identical to SEQ ID NO: 973
  misc_feature 1..1503: note = hEp14D2 LH x I2C HL
  source 1..1503: mol_type = other DNA

SEQ ID NO: 1764 - protein, 119 aa, synthetic construct; identical to SEQ ID NO: 1063
  REGION 1..119: note = HEP18A6-H

SEQ ID NO: 1765 - protein, 5 aa, synthetic construct
  REGION 1..5: note = HEP18A6-HCDR1
NYWLG

SEQ ID NO: 1766 - protein, 17 aa, synthetic construct
  REGION 1..17: note = HEP18A6-HCDR2
DIFPGSGNIHYNEKFKG

SEQ ID NO: 1767 - protein, 10 aa, synthetic construct
  REGION 1..10: note = HEP18A6-HCDR3
LRNWDEPMDY

SEQ ID NO: 1768 - DNA, 357 bp, synthetic construct; identical to SEQ ID NO: 1067
  misc_feature 1..357: note = HEP18A6-H
  source 1..357: mol_type = other DNA

SEQ ID NO: 1769 - protein, 113 aa, synthetic construct; identical to SEQ ID NO: 1058
  REGION 1..113: note = HEP18A6-L

SEQ ID NO: 1770 - protein, 17 aa, synthetic construct
  REGION 1..17: note = HEP18A6-LCDR1
KSSQSLLNSGNQKNYLT

SEQ ID NO: 1771 - protein, 7 aa, synthetic construct
  REGION 1..7: note = HEP18A6-LCDR2
WASTRES

SEQ ID NO: 1772 - protein, 9 aa, synthetic construct
  REGION 1..9: note = HEP18A6-LCDR3
QNDYSYPLT

SEQ ID NO: 1773 - DNA, 339 bp, synthetic construct; identical to SEQ ID NO: 1062
  misc_feature 1..339: note = HEP18A6-L
  source 1..339: mol_type = other DNA

SEQ ID NO: 1774 - protein, 247 aa, synthetic construct
  REGION 1..247: note = HEP18A6-LH
DIVMTQTPLSLPVTPGEQVSMSCKSSQSLLNSGNQKNYLTWYLQKPGQSPQLLIYWASTRESGVPDRFSGSGSGTDFTLNISSVEAEDVGVYYCQNDYSYPLTFGQGTKLEIKGGGGSGGGGSGGGGSQVQLVQSGAEVKKPGSSVKVSCKASGYTFSNYWLGWVRQTPGQGLEWMGDIFPGSGNIHYNEKFKGRVTITADKSTSTAYMELSSLTSEDTAVYYCARLRNWDEPMDYWGQGTTVTVSS

SEQ ID NO: 1775 - DNA, 741 bp, synthetic construct
  misc_feature 1..741: note = HEP18A6-LH
  source 1..741: mol_type = other DNA
gacatcgtgatgacacagactccactctccctgcctgtgacaccaggagagcaggtctctatgagctgcaagtccagtcagagtctgttaaacagtggaaatcaaaagaactacttgacctggtacctgcagaaaccagggcagtctcctcaactgttgatctactgggcatccactagggaatctggggtccctgatcgcttctcaggcagtggatctggaacagatttcactctcaacatcagcagtgtggaggctgaagacgtgggagtttattactgtcagaatgattatagttatccgctcacgttcggtcaagggaccaagcttgagatcaaaggtggtggtggttctggcggcggcggctccggtggtggtggttctcaggtgcagctggtccagtctggagctgaggtgaaaaagcctgggtcttcagtgaaggtatcctgcaaggcttctggatacaccttctctaactactggctaggttgggtaaggcagacgcctggacagggacttgagtggatgggagatattttccctggaagtggtaatatccactacaatgagaagttcaagggcagagtcacaatcactgcagacaaatctacgagcacagcctatatggaactcagtagcctgacatctgaggacactgctgtctattactgtgcaagactgaggaactgggacgagcctatggactactggggccaagggaccacggtcaccgtctcctcc

SEQ ID NO: 1776 - protein, 501 aa, synthetic construct
  REGION 1..501: note = hEp18A6 LH x I2C HL
DIVMTQTPLSLPVTPGEQVSMSCKSSQSLLNSGNQKNYLTWYLQKPGQSPQLLIYWASTRESGVPDRFSGSGSGTDFTLNISSVEAEDVGVYYCQNDYSYPLTFGQGTKLEIKGGGGSGGGGSGGGGSQVQLVQSGAEVKKPGSSVKVSCKASGYTFSNYWLGWVRQTPGQGLEWMGDIFPGSGNIHYNEKFKGRVTITADKSTSTAYMELSSLTSEDTAVYYCARLRNWDEPMDYWGQGTTVTVSSGGGGSEVQLVESGGGLVQPGGSLKLSCAASGFTFNKYAMNWVRQAPGKGLEWVARIRSKYNNYATYYADSVKDRFTISRDDSKNTAYLQMNNLKTEDTAVYYCVRHGNFGNSYISYWAYWGQGTLVTVSSGGGGSGGGGSGGGGSQTVVTQEPSLTVSPGGTVTLTCGSSTGAVTSGNYPNWVQQKPGQAPRGLIGGTKFLAPGTPARFSGSLLGGKAALTLSGVQPEDEAEYYCVLWYSNRWVFGGGTKLTVL

SEQ ID NO: 1777 - DNA, 1503 bp, synthetic construct
  misc_feature 1..1503: note = hEp18A6 LH x I2C HL
  source 1..1503: mol_type = other DNA
gacatcgtgatgacacagactccactctccctgcctgtgacaccaggagagcaggtctctatgagctgcaagtccagtcagagtctgttaaacagtggaaatcaaaagaactacttgacctggtacctgcagaaaccagggcagtctcctcaactgttgatctactgggcatccactagggaatctggggtccctgatcgcttctcaggcagtggatctggaacagatttcactctcaacatcagcagtgtggaggctgaagacgtgggagtttattactgtcagaatgattatagttatccgctcacgttcggtcaagggaccaagcttgagatcaaaggtggtggtggttctggcggcggcggctccggtggtggtggttctcaggtgcagctggtccagtctggagctgaggtgaaaaagcctgggtcttcagtgaaggtatcctgcaaggcttctggatacaccttctctaactactggctaggttgggtaaggcagacgcctggacagggacttgagtggatgggagatattttccctggaagtggtaatatccactacaatgagaagttcaagggcagagtcacaatcactgcagacaaatctacgagcacagcctatatggaactcagtagcctgacatctgaggacactgctgtctattactgtgcaagactgaggaactgggacgagcctatggactactggggccaagggaccacggtcaccgtctcctccggaggtggtggatccgaggtgcagctggtcgagtctggaggaggattggtgcagcctggagggtcattgaaactctcatgtgcagcctctggattcaccttcaataagtacgccatgaactgggtccgccaggctccaggaaagggtttggaatgggttgctcgcataagaagtaaatataataattatgcaacatattatgccgattcagtgaaagacaggttcaccatctccagagatgattcaaaaaacactgcctatctacaaatgaacaacttgaaaactgaggacactgccgtgtactactgtgtgagacatgggaacttcggtaatagctacatatcctactgggcttactggggccaagggactctggtcaccgtctcctcaggtggtggtggttctggcggcggcggctccggtggtggtggttctcagactgttgtgactcaggaaccttcactcaccgtatcacctggtggaacagtcacactcacttgtggctcctcgactggggctgttacatctggcaactacccaaactgggtccaacaaaaaccaggtcaggcaccccgtggtctaataggtgggactaagttcctcgcccccggtactcctgccagattctcaggctccctgcttggaggcaaggctgccctcaccctctcaggggtacagccagaggatgaggcagaatattactgtgttctatggtacagcaaccgctgggtgttcggtggaggaaccaaactgactgtccta

SEQ ID NO: 1778 - protein, 124 aa, synthetic construct
  REGION 1..124: note = FA22A9-H
QVQLVQSGAEVKKPGASVKVSCKTSGYTFTEYTIHWVRQAPGQRLEWMGGINPNNGIPNYNQKFKGRVTITIDTSSSTAYMELSSLRSEDTAVYYCARRRIAYGYDEGHAMDYWGQGTLVTVSS

SEQ ID NO: 1779 - protein, 5 aa, synthetic construct
  REGION 1..5: note = FA22A9-HCDR1
EYTIH

SEQ ID NO: 1780 - protein, 17 aa, synthetic construct
  REGION 1..17: note = FA22A9-HCDR2
GINPNNGIPNYNQKFKG

SEQ ID NO: 1781 - protein, 15 aa, synthetic construct
  REGION 1..15: note = FA22A9-HCDR3
RRIAYGYDEGHAMDY

SEQ ID NO: 1782 - DNA, 372 bp, synthetic construct
  misc_feature 1..372: note = FA22A9-H
  source 1..372: mol_type = other DNA
caggtgcagctggtccagtctggagctgaggtgaagaagcctggggcttcagtaaaggtgtcctgcaagacttctggatacacattcactgaatacaccatacactgggtgagacaggcccctggacagagacttgagtggatgggaggtattaatcctaacaatggtattcctaactacaatcagaagttcaagggcagggtcacaataactatagacacgtcctccagcaccgcctacatggagctcagcagcctgagatctgaggatactgcggtctattactgtgcaagaagaagaatcgcctatggttacgacgagggccatgctatggactactggggtcaaggaaccctggtcaccgtctcctca

SEQ ID NO: 1783 - protein, 113 aa, synthetic construct
  REGION 1..113: note = FA22A9-L
DIVMTQTPLSLAVTVGETASMSCKSSQSLLYSRNQKNYLAWYLQKPGQSPQLLIYWASTRESGVPDRFSGSGSGTDFTLTISRVEAEDVGVYYCQQYFSYPLTFGGGTKVEIK

SEQ ID NO: 1784 - protein, 17 aa, synthetic construct
  REGION 1..17: note = FA22A9-LCDR1
KSSQSLLYSRNQKNYLA

SEQ ID NO: 1785 - protein, 7 aa, synthetic construct
  REGION 1..7: note = FA22A9-LCDR2
WASTRES

SEQ ID NO: 1786 - protein, 9 aa, synthetic construct
  REGION 1..9: note = FA22A9-LCDR3
QQYFSYPLT

SEQ ID NO: 1787 - DNA, 339 bp, synthetic construct
  misc_feature 1..339: note = FA22A9-L
  source 1..339: mol_type = other DNA
gacatcgtgatgacacagactccactctccctagctgtgacagttggagagacggcttctatgagctgcaagtccagtcagagccttttatatagtcgtaatcaaaagaactacttggcctggtacctgcagaagccagggcagtctcctcaactgctgatttactgggcatccactagggaatctggggtccctgatcgcttctcaggcagtggatctgggacggatttcactctcacgatcagcagagtggaggctgaggacgtgggagtttattactgtcagcaatattttagctatccgctcacgttcggtggtgggaccaaggtggagatcaaa

SEQ ID NO: 1788 - protein, 252 aa, synthetic construct
  REGION 1..252: note = FA22A9-HL
QVQLVQSGAEVKKPGASVKVSCKTSGYTFTEYTIHWVRQAPGQRLEWMGGINPNNGIPNYNQKFKGRVTITIDTSSSTAYMELSSLRSEDTAVYYCARRRIAYGYDEGHAMDYWGQGTLVTVSSGGGGSGGGGSGGGGSDIVMTQTPLSLAVTVGETASMSCKSSQSLLYSRNQKNYLAWYLQKPGQSPQLLIYWASTRESGVPDRFSGSGSGTDFTLTISRVEAEDVGVYYCQQYFSYPLTFGGGTKVEIK

SEQ ID NO: 1789 - DNA, 756 bp, synthetic construct
  misc_feature 1..756: note = FA22A9-HL
  source 1..756: mol_type = other DNA
caggtgcagctggtccagtctggagctgaggtgaagaagcctggggcttcagtaaaggtgtcctgcaagacttctggatacacattcactgaatacaccatacactgggtgagacaggcccctggacagagacttgagtggatgggaggtattaatcctaacaatggtattcctaactacaatcagaagttcaagggcagggtcacaataactatagacacgtcctccagcaccgcctacatggagctcagcagcctgagatctgaggatactgcggtctattactgtgcaagaagaagaatcgcctatggttacgacgagggccatgctatggactactggggtcaaggaaccctggtcaccgtctcctcaggtggtggtggttctggcggcggcggctccggtggtggtggttctgacatcgtgatgacacagactccactctccctagctgtgacagttggagagacggcttctatgagctgcaagtccagtcagagccttttatatagtcgtaatcaaaagaactacttggcctggtacctgcagaagccagggcagtctcctcaactgctgatttactgggcatccactagggaatctggggtccctgatcgcttctcaggcagtggatctgggacggatttcactctcacgatcagcagagtggaggctgaggacgtgggagtttattactgtcagcaatattttagctatccgctcacgttcggtggtgggaccaaggtggagatcaaa

SEQ ID NO: 1790 - protein, 507 aa, synthetic construct
  REGION 1..507: note = FA22A9 HL x I2C HL
QVQLVQSGAEVKKPGASVKVSCKTSGYTFTEYTIHWVRQAPGQRLEWMGGINPNNGIPNYNQKFKGRVTITIDTSSSTAYMELSSLRSEDTAVYYCARRRIAYGYDEGHAMDYWGQGTLVTVSSGGGGSGGGGSGGGGSDIVMTQTPLSLAVTVGETASMSCKSSQSLLYSRNQKNYLAWYLQKPGQSPQLLIYWASTRESGVPDRFSGSGSGTDFTLTISRVEAEDVGVYYCQQYFSYPLTFGGGTKVEIKSGGGGSEVQLVESGGGLVQPGGSLKLSCAASGFTFNKYAMNWVRQAPGKGLEWVARIRSKYNNYATYYADSVKDRFTISRDDSKNTAYLQMNNLKTEDTAVYYCVRHGNFGNSYISYWAYWGQGTLVTVSSGGGGSGGGGSGGGGSQTVVTQEPSLTVSPGGTVTLTCGSSTGAVTSGNYPNWVQQKPGQAPRGLIGGTKFLAPGTPARFSGSLLGGKAALTLSGVQPEDEAEYYCVLWYSNRWVFGGGTKLTVL

SEQ ID NO: 1791 - DNA, 1521 bp, synthetic construct
  misc_feature 1..1521: note = FA22A9 HL x I2C HL
  source 1..1521: mol_type = other DNA
caggtgcagctggtccagtctggagctgaggtgaagaagcctggggcttcagtaaaggtgtcctgcaagacttctggatacacattcactgaatacaccatacactgggtgagacaggcccctggacagagacttgagtggatgggaggtattaatcctaacaatggtattcctaactacaatcagaagttcaagggcagggtcacaataactatagacacgtcctccagcaccgcctacatggagctcagcagcctgagatctgaggatactgcggtctattactgtgcaagaagaagaatcgcctatggttacgacgagggccatgctatggactactggggtcaaggaaccctggtcaccgtctcctcaggtggtggtggttctggcggcggcggctccggtggtggtggttctgacatcgtgatgacacagactccactctccctagctgtgacagttggagagacggcttctatgagctgcaagtccagtcagagccttttatatagtcgtaatcaaaagaactacttggcctggtacctgcagaagccagggcagtctcctcaactgctgatttactgggcatccactagggaatctggggtccctgatcgcttctcaggcagtggatctgggacggatttcactctcacgatcagcagagtggaggctgaggacgtgggagtttattactgtcagcaatattttagctatccgctcacgttcggtggtgggaccaaggtggagatcaaatccggaggtggtggatccgaggtgcagctggtcgagtctggaggaggattggtgcagcctggagggtcattgaaactctcatgtgcagcctctggattcaccttcaataagtacgccatgaactgggtccgccaggctccaggaaagggtttggaatgggttgctcgcataagaagtaaatataataattatgcaacatattatgccgattcagtgaaagacaggttcaccatctccagagatgattcaaaaaacactgcctatctacaaatgaacaacttgaaaactgaggacactgccgtgtactactgtgtgagacatgggaacttcggtaatagctacatatcctactgggcttactggggccaagggactctggtcaccgtctcctcaggtggtggtggttctggcggcggcggctccggtggtggtggttctcagactgttgtgactcaggaaccttcactcaccgtatcacctggtggaacagtcacactcacttgtggctcctcgactggggctgttacatctggcaactacccaaactgggtccaacaaaaaccaggtcaggcaccccgtggtctaataggtgggactaagttcctcgcccccggtactcctgccagattctcaggctccctgcttggaggcaaggctgccctcaccctctcaggggtacagccagaggatgaggcagaatattactgtgttctatggtacagcaaccgctgggtgttcggtggaggaaccaaactgactgtccta

SEQ ID NO: 1792 - protein, 124 aa, synthetic construct
  REGION 1..124: note = FA22C11-H
QVQLVQSGAEVKKPGASVKVSCKTSGYTFTEYTIHWVRQSPGQRLEWMGGINPNNGIPNYNQKFKGRVTITRDKSSSTAYMELSSLRSEDTAVYYCARRRIAYGYDEGHAMDYWGQGTLVTVSS

SEQ ID NO: 1793 - protein, 5 aa, synthetic construct
  REGION 1..5: note = FA22C11-HCDR1
EYTIH

SEQ ID NO: 1794 - protein, 17 aa, synthetic construct
  REGION 1..17: note = FA22C11-HCDR2
GINPNNGIPNYNQKFKG

SEQ ID NO: 1795 - protein, 15 aa, synthetic construct
  REGION 1..15: note = FA22C11-HCDR3
RRIAYGYDEGHAMDY

SEQ ID NO: 1796 - DNA, 372 bp, synthetic construct
  misc_feature 1..372: note = FA22C11-H
  source 1..372: mol_type = other DNA
caggtgcagctggtccagtctggagctgaggtgaagaagcctggggcttcagtaaaggtgtcctgcaagacttctggatacacattcactgaatacaccatacactgggtgagacagtcccctggacagagacttgagtggatgggaggtattaatcctaacaatggtattcctaactacaatcagaagttcaagggcagggtcacaataactagagacaagtcctccagcaccgcctacatggagctcagcagcctgagatctgaggatactgcggtctattactgtgcaagaagaagaatcgcctatggttacgacgagggccatgctatggactactggggtcaaggaaccctggtcaccgtctcctca

SEQ ID NO: 1797 - protein, 113 aa, synthetic construct
  REGION 1..113: note = FA22C11-L
DIVMTQTPLSLPVTVGEPASISCKSSQSLLYSRNQKNYLAWYLQKPGQSPQLLIYWASTRESGVPDRFSGSGSGTDFTLKISRVEAEDVGIYYCQQYFSYPLTFGGGTKVEIK

SEQ ID NO: 1798 - protein, 17 aa, synthetic construct
  REGION 1..17: note = FA22C11-LCDR1
KSSQSLLYSRNQKNYLA

SEQ ID NO: 1799 - protein, 7 aa, synthetic construct
  REGION 1..7: note = FA22C11-LCDR2
WASTRES

SEQ ID NO: 1800 - protein, 9 aa, synthetic construct
  REGION 1..9: note = FA22C11-LCDR3
QQYFSYPLT

SEQ ID NO: 1801 - DNA, 339 bp, synthetic construct
  misc_feature 1..339: note = FA22C11-L
  source 1..339: mol_type = other DNA
gacatcgtgatgacacagactccactctccctacctgtgacagttggagagccggcttctatcagctgcaagtccagtcagagccttttatatagtcgtaatcaaaagaactacttggcctggtacctgcagaagccagggcagtctcctcaactgctgatttactgggcatccactagggaatctggggtccctgatcgcttctcaggcagtggatctgggacagacttcaccctcaagatctctcgtgtggaggcggaggatgttggaatctattactgtcagcaatattttagctatccgctcacgttcggtggtgggaccaaggtggagatcaaa

SEQ ID NO: 1802 - protein, 252 aa, synthetic construct
  REGION 1..252: note = FA22C11-HL
QVQLVQSGAEVKKPGASVKVSCKTSGYTFTEYTIHWVRQSPGQRLEWMGGINPNNGIPNYNQKFKGRVTITRDKSSSTAYMELSSLRSEDTAVYYCARRRIAYGYDEGHAMDYWGQGTLVTVSSGGGGSGGGGSGGGGSDIVMTQTPLSLPVTVGEPASISCKSSQSLLYSRNQKNYLAWYLQKPGQSPQLLIYWASTRESGVPDRFSGSGSGTDFTLKISRVEAEDVGIYYCQQYFSYPLTFGGGTKVEIK

SEQ ID NO: 1803 - DNA, 756 bp, synthetic construct
  misc_feature 1..756: note = FA22C11-HL
  source 1..756: mol_type = other DNA
caggtgcagctggtccagtctggagctgaggtgaagaagcctggggcttcagtaaaggtgtcctgcaagacttctggatacacattcactgaatacaccatacactgggtgagacagtcccctggacagagacttgagtggatgggaggtattaatcctaacaatggtattcctaactacaatcagaagttcaagggcagggtcacaataactagagacaagtcctccagcaccgcctacatggagctcagcagcctgagatctgaggatactgcggtctattactgtgcaagaagaagaatcgcctatggttacgacgagggccatgctatggactactggggtcaaggaaccctggtcaccgtctcctcaggtggtggtggttctggcggcggcggctccggtggtggtggttctgacatcgtgatgacacagactccactctccctacctgtgacagttggagagccggcttctatcagctgcaagtccagtcagagccttttatatagtcgtaatcaaaagaactacttggcctggtacctgcagaagccagggcagtctcctcaactgctgatttactgggcatccactagggaatctggggtccctgatcgcttctcaggcagtggatctgggacagacttcaccctcaagatctctcgtgtggaggcggaggatgttggaatctattactgtcagcaatattttagctatccgctcacgttcggtggtgggaccaaggtggagatcaaa

SEQ ID NO: 1804 - protein, 507 aa, synthetic construct
  REGION 1..507: note = FA22C11 HL x I2C HL
QVQLVQSGAEVKKPGASVKVSCKTSGYTFTEYTIHWVRQSPGQRLEWMGGINPNNGIPNYNQKFKGRVTITRDKSSSTAYMELSSLRSEDTAVYYCARRRIAYGYDEGHAMDYWGQGTLVTVSSGGGGSGGGGSGGGGSDIVMTQTPLSLPVTVGEPASISCKSSQSLLYSRNQKNYLAWYLQKPGQSPQLLIYWASTRESGVPDRFSGSGSGTDFTLKISRVEAEDVGIYYCQQYFSYPLTFGGGTKVEIKSGGGGSEVQLVESGGGLVQPGGSLKLSCAASGFTFNKYAMNWVRQAPGKGLEWVARIRSKYNNYATYYADSVKDRFTISRDDSKNTAYLQMNNLKTEDTAVYYCVRHGNFGNSYISYWAYWGQGTLVTVSSGGGGSGGGGSGGGGSQTVVTQEPSLTVSPGGTVTLTCGSSTGAVTSGNYPNWVQQKPGQAPRGLIGGTKFLAPGTPARFSGSLLGGKAALTLSGVQPEDEAEYYCVLWYSNRWVFGGGTKLTVL

SEQ ID NO: 1805 - DNA, 1521 bp, synthetic construct
  misc_feature 1..1521: note = FA22C11 HL x I2C HL
  source 1..1521: mol_type = other DNA
caggtgcagctggtccagtctggagctgaggtgaagaagcctggggcttcagtaaaggtgtcctgcaagacttctggatacacattcactgaatacaccatacactgggtgagacagtcccctggacagagacttgagtggatgggaggtattaatcctaacaatggtattcctaactacaatcagaagttcaagggcagggtcacaataactagagacaagtcctccagcaccgcctacatggagctcagcagcctgagatctgaggatactgcggtctattactgtgcaagaagaagaatcgcctatggttacgacgagggccatgctatggactactggggtcaaggaaccctggtcaccgtctcctcaggtggtggtggttctggcggcggcggctccggtggtggtggttctgacatcgtgatgacacagactccactctccctacctgtgacagttggagagccggcttctatcagctgcaagtccagtcagagccttttatatagtcgtaatcaaaagaactacttggcctggtacctgcagaagccagggcagtctcctcaactgctgatttactgggcatccactagggaatctggggtccctgatcgcttctcaggcagtggatctgggacagacttcaccctcaagatctctcgtgtggaggcggaggatgttggaatctattactgtcagcaatattttagctatccgctcacgttcggtggtgggaccaaggtggagatcaaatccggaggtggtggatccgaggtgcagctggtcgagtctggaggaggattggtgcagcctggagggtcattgaaactctcatgtgcagcctctggattcaccttcaataagtacgccatgaactgggtccgccaggctccaggaaagggtttggaatgggttgctcgcataagaagtaaatataataattatgcaacatattatgccgattcagtgaaagacaggttcaccatctccagagatgattcaaaaaacactgcctatctacaaatgaacaacttgaaaactgaggacactgccgtgtactactgtgtgagacatgggaacttcggtaatagctacatatcctactgggcttactggggccaagggactctggtcaccgtctcctcaggtggtggtggttctggcggcggcggctccggtggtggtggttctcagactgttgtgactcaggaaccttcactcaccgtatcacctggtggaacagtcacactcacttgtggctcctcgactggggctgttacatctggcaactacccaaactgggtccaacaaaaaccaggtcaggcaccccgtggtctaataggtgggactaagttcctcgcccccggtactcctgccagattctcaggctccctgcttggaggcaaggctgccctcaccctctcaggggtacagccagaggatgaggcagaatattactgtgttctatggtacagcaaccgctgggtgttcggtggaggaaccaaactgactgtccta

SEQ ID NO: 1806 - protein, 124 aa, synthetic construct
  REGION 1..124: note = FA22D8-H
QVQLVQSGAEVEKPGASVKVSCKASGYTFTEYTIHWVRQAPGQRLEWMGGINPNNGIPNYNQKFKGRATITIDTSSSTAYMELSSLTSEDTAVYYCARRRIAYGYDEGHAMDYWGQGTLVTVSS

SEQ ID NO: 1807 - protein, 5 aa, synthetic construct
  REGION 1..5: note = FA22D8-HCDR1
EYTIH

SEQ ID NO: 1808 - protein, 17 aa, synthetic construct
  REGION 1..17: note = FA22D8-HCDR2
GINPNNGIPNYNQKFKG

SEQ ID NO: 1809 - protein, 15 aa, synthetic construct
  REGION 1..15: note = FA22D8-HCDR3
RRIAYGYDEGHAMDY

SEQ ID NO: 1810 - DNA, 372 bp, synthetic construct
  misc_feature 1..372: note = FA22D8-H
  source 1..372: mol_type = other DNA
caggtgcagctggtccagtctggagctgaggtggagaagcctggggcttcagtaaaggtgtcctgcaaggcttctggatacacattcactgaatacaccatacactgggtgagacaggcccctggacagagacttgagtggatgggaggtattaatcctaacaatggtattcctaactacaatcagaagttcaagggcagggccacaataactatagacacgtcctccagcaccgcctacatggagctcagcagcctgacatctgaggatactgcggtctattactgtgcaagaagaagaatcgcctatggttacgacgagggccatgctatggactactggggtcaaggaaccctggtcaccgtctcctca

SEQ ID NO: 1811 - protein, 113 aa, synthetic construct
  REGION 1..113: note = FA22D8-L
DIVMTQTPLSLPVTVGEQASISCKSSQSLLYSRNQKNYLAWYLQKPGQSPKLLIYWASTRESGVPDRFSGSGSGTDFTLKISSVEAEDVGVYYCQQYFSYPLTFGGGTKVEIK

SEQ ID NO: 1812 - protein, 17 aa, synthetic construct
  REGION 1..17: note = FA22D8-LCDR1
KSSQSLLYSRNQKNYLA

SEQ ID NO: 1813 - protein, 7 aa, synthetic construct
  REGION 1..7: note = FA22D8-LCDR2
WASTRES

SEQ ID NO: 1814 - protein, 9 aa, synthetic construct
  REGION 1..9: note = FA22D8-LCDR3
QQYFSYPLT

SEQ ID NO: 1815 - DNA, 339 bp, synthetic construct
  misc_feature 1..339: note = FA22D8-L
  source 1..339: mol_type = other DNA
gacatcgtgatgacacagactccactctccctacctgtgacagttggagagcaggcttctatcagctgcaagtccagtcagagccttttatatagtcgtaatcaaaagaactacttggcctggtacctgcagaagccagggcagtctcctaaactgctgatttactgggcatccactagggaatctggggtccctgatcgcttctcaggcagtggatctgggacggatttcactctcaagatcagcagtgtggaggctgaggatgttggagtctattactgtcagcaatattttagctatccgctcacgttcggtggtgggaccaaggtggagatcaaa

SEQ ID NO: 1816 - protein, 252 aa, synthetic construct
  REGION 1..252: note = FA22D8-HL
QVQLVQSGAEVEKPGASVKVSCKASGYTFTEYTIHWVRQAPGQRLEWMGGINPNNGIPNYNQKFKGRATITIDTSSSTAYMELSSLTSEDTAVYYCARRRIAYGYDEGHAMDYWGQGTLVTVSSGGGGSGGGGSGGGGSDIVMTQTPLSLPVTVGEQASISCKSSQSLLYSRNQKNYLAWYLQKPGQSPKLLIYWASTRESGVPDRFSGSGSGTDFTLKISSVEAEDVGVYYCQQYFSYPLTFGGGTKVEIK

SEQ ID NO: 1817 - DNA, 756 bp, synthetic construct
  misc_feature 1..756: note = FA22D8-HL
  source 1..756: mol_type = other DNA
caggtgcagctggtccagtctggagctgaggtggagaagcctggggcttcagtaaaggtgtcctgcaaggcttctggatacacattcactgaatacaccatacactgggtgagacaggcccctggacagagacttgagtggatgggaggtattaatcctaacaatggtattcctaactacaatcagaagttcaagggcagggccacaataactatagacacgtcctccagcaccgcctacatggagctcagcagcctgacatctgaggatactgcggtctattactgtgcaagaagaagaatcgcctatggttacgacgagggccatgctatggactactggggtcaaggaaccctggtcaccgtctcctcaggtggtggtggttctggcggcggcggctccggtggtggtggttctgacatcgtgatgacacagactccactctccctacctgtgacagttggagagcaggcttctatcagctgcaagtccagtcagagccttttatatagtcgtaatcaaaagaactacttggcctggtacctgcagaagccagggcagtctcctaaactgctgatttactgggcatccactagggaatctggggtccctgatcgcttctcaggcagtggatctgggacggatttcactctcaagatcagcagtgtggaggctgaggatgttggagtctattactgtcagcaatattttagctatccgctcacgttcggtggtgggaccaaggtggagatcaaa

SEQ ID NO: 1818 - protein, 507 aa, synthetic construct
  REGION 1..507: note = FA22D8 HL x I2C HL
QVQLVQSGAEVEKPGASVKVSCKASGYTFTEYTIHWVRQAPGQRLEWMGGINPNNGIPNYNQKFKGRATITIDTSSSTAYMELSSLTSEDTAVYYCARRRIAYGYDEGHAMDYWGQGTLVTVSSGGGGSGGGGSGGGGSDIVMTQTPLSLPVTVGEQASISCKSSQSLLYSRNQKNYLAWYLQKPGQSPKLLIYWASTRESGVPDRFSGSGSGTDFTLKISSVEAEDVGVYYCQQYFSYPLTFGGGTKVEIKSGGGGSEVQLVESGGGLVQPGGSLKLSCAASGFTFNKYAMNWVRQAPGKGLEWVARIRSKYNNYATYYADSVKDRFTISRDDSKNTAYLQMNNLKTEDTAVYYCVRHGNFGNSYISYWAYWGQGTLVTVSSGGGGSGGGGSGGGGSQTVVTQEPSLTVSPGGTVTLTCGSSTGAVTSGNYPNWVQQKPGQAPRGLIGGTKFLAPGTPARFSGSLLGGKAALTLSGVQPEDEAEYYCVLWYSNRWVFGGGTKLTVL

SEQ ID NO: 1819 - DNA, 1521 bp, synthetic construct
  misc_feature 1..1521: note = FA22D8 HL x I2C HL
  source 1..1521: mol_type = other DNA
caggtgcagctggtccagtctggagctgaggtggagaagcctggggcttcagtaaaggtgtcctgcaaggcttctggatacacattcactgaatacaccatacactgggtgagacaggcccctggacagagacttgagtggatgggaggtattaatcctaacaatggtattcctaactacaatcagaagttcaagggcagggccacaataactatagacacgtcctccagcaccgcctacatggagctcagcagcctgacatctgaggatactgcggtctattactgtgcaagaagaagaatcgcctatggttacgacgagggccatgctatggactactggggtcaaggaaccctggtcaccgtctcctcaggtggtggtggttctggcggcggcggctccggtggtggtggttctgacatcgtgatgacacagactccactctccctacctgtgacagttggagagcaggcttctatcagctgcaagtccagtcagagccttttatatagtcgtaatcaaaagaactacttggcctggtacctgcagaagccagggcagtctcctaaactgctgatttactgggcatccactagggaatctggggtccctgatcgcttctcaggcagtggatctgggacggatttcactctcaagatcagcagtgtggaggctgaggatgttggagtctattactgtcagcaatattttagctatccgctcacgttcggtggtgggaccaaggtggagatcaaatccggaggtggtggatccgaggtgcagctggtcgagtctggaggaggattggtgcagcctggagggtcattgaaactctcatgtgcagcctctggattcaccttcaataagtacgccatgaactgggtccgccaggctccaggaaagggtttggaatgggttgctcgcataagaagtaaatataataattatgcaacatattatgccgattcagtgaaagacaggttcaccatctccagagatgattcaaaaaacactgcctatctacaaatgaacaacttgaaaactgaggacactgccgtgtactactgtgtgagacatgggaacttcggtaatagctacatatcctactgggcttactggggccaagggactctggtcaccgtctcctcaggtggtggtggttctggcggcggcggctccggtggtggtggttctcagactgttgtgactcaggaaccttcactcaccgtatcacctggtggaacagtcacactcacttgtggctcctcgactggggctgttacatctggcaactacccaaactgggtccaacaaaaaccaggtcaggcaccccgtggtctaataggtgggactaagttcctcgcccccggtactcctgccagattctcaggctccctgcttggaggcaaggctgccctcaccctctcaggggtacagccagaggatgaggcagaatattactgtgttctatggtacagcaaccgctgggtgttcggtggaggaaccaaactgactgtccta

SEQ ID NO: 1820 - protein, 124 aa, synthetic construct
  REGION 1..124: note = FA22E8-H
QVQLVQSGAELVKPGASVKVSCKASGYTFTEYTIHWVRQAPGQRLEWMGGINPNNGIPNYNQKFKGRATITIDTSASTAYMELRSLRSEDTAVYYCARRRIAYGYDEGHAMDYWGQGTLVTVSS

SEQ ID NO: 1821 - protein, 5 aa, synthetic construct
  REGION 1..5: note = FA22E8-HCDR1
EYTIH

SEQ ID NO: 1822 - protein, 17 aa, synthetic construct
  REGION 1..17: note = FA22E8-HCDR2
GINPNNGIPNYNQKFKG

SEQ ID NO: 1823 - protein, 15 aa, synthetic construct
  REGION 1..15: note = FA22E8-HCDR3
RRIAYGYDEGHAMDY

SEQ ID NO: 1824 - DNA, 372 bp, synthetic construct
  misc_feature 1..372: note = FA22E8-H
  source 1..372: mol_type = other DNA
caggtgcagctggtccagtctggagctgagctggtgaagcctggggcttcagtaaaggtgtcctgcaaggcttctggatacacattcactgaatacaccatacactgggtgagacaggcccctggacagagacttgagtggatgggaggtattaatcctaacaatggtattcctaactacaatcagaagttcaagggcagggccacaataactatagacacgtccgccagcaccgcctacatggagctccgcagcctgagatctgaggatactgcggtctattactgtgcaagaagaagaatcgcctatggttacgacgagggccatgctatggactactggggtcaaggaaccctggtcaccgtctcctca

SEQ ID NO: 1825 - protein, 113 aa, synthetic construct
  REGION 1..113: note = FA22E8-L
DIVMTQTPLSLAVTPGEQASISCKSSQSLLYSRNQKNYLAWYLQKPGQSPQLLIYWASTRESGVPDRFSGSGFGTDFTLKISGVEAEDVGVYYCQQYFSYPLTFGGGTKVEIK

SEQ ID NO: 1826 - protein, 17 aa, synthetic construct
  REGION 1..17: note = FA22E8-LCDR1
KSSQSLLYSRNQKNYLA

SEQ ID NO: 1827 - protein, 7 aa, synthetic construct
  REGION 1..7: note = FA22E8-LCDR2
WASTRES

SEQ ID NO: 1828 - protein, 9 aa, synthetic construct
  REGION 1..9: note = FA22E8-LCDR3
QQYFSYPLT

SEQ ID NO: 1829 - DNA, 339 bp, synthetic construct
  misc_feature 1..339: note = FA22E8-L
  source 1..339: mol_type = other DNA
gacatcgtgatgacacagactccactctccctagctgtgacacctggagagcaggcttctatcagctgcaagtccagtcagagccttttatatagtcgtaatcaaaagaactacttggcctggtacctgcagaagccagggcagtctcctcaactgctgatttactgggcatccactagggaatctggggtccctgatcgcttctcaggcagtggatttgggacggatttcactctcaagatcagcggagtggaggctgaggacgtgggagtttattactgtcagcaatattttagctatccgctcacgttcggtggtgggaccaaggtggagatcaaa

SEQ ID NO: 1830 - protein, 252 aa, synthetic construct
  REGION 1..252: note = FA22E8-HL
QVQLVQSGAELVKPGASVKVSCKASGYTFTEYTIHWVRQAPGQRLEWMGGINPNNGIPNYNQKFKGRATITIDTSASTAYMELRSLRSEDTAVYYCARRRIAYGYDEGHAMDYWGQGTLVTVSSGGGGSGGGGSGGGGSDIVMTQTPLSLAVTPGEQASISCKSSQSLLYSRNQKNYLAWYLQKPGQSPQLLIYWASTRESGVPDRFSGSGFGTDFTLKISGVEAEDVGVYYCQQYFSYPLTFGGGTKVEIK

SEQ ID NO: 1831 - DNA, 756 bp, synthetic construct
  misc_feature 1..756: note = FA22E8-HL
  source 1..756: mol_type = other DNA
caggtgcagctggtccagtctggagctgagctggtgaagcctggggcttcagtaaaggtgtcctgcaaggcttctggatacacattcactgaatacaccatacactgggtgagacaggcccctggacagagacttgagtggatgggaggtattaatcctaacaatggtattcctaactacaatcagaagttcaagggcagggccacaataactatagacacgtccgccagcaccgcctacatggagctccgcagcctgagatctgaggatactgcggtctattactgtgcaagaagaagaatcgcctatggttacgacgagggccatgctatggactactggggtcaaggaaccctggtcaccgtctcctcaggtggtggtggttctggcggcggcggctccggtggtggtggttctgacatcgtgatgacacagactccactctccctagctgtgacacctggagagcaggcttctatcagctgcaagtccagtcagagccttttatatagtcgtaatcaaaagaactacttggcctggtacctgcagaagccagggcagtctcctcaactgctgatttactgggcatccactagggaatctggggtccctgatcgcttctcaggcagtggatttgggacggatttcactctcaagatcagcggagtggaggctgaggacgtgggagtttattactgtcagcaatattttagctatccgctcacgttcggtggtgggaccaaggtggagatcaaa

SEQ ID NO: 1832 - protein, 507 aa, synthetic construct
  REGION 1..507: note = FA22E8 HL x I2C HL
QVQLVQSGAELVKPGASVKVSCKASGYTFTEYTIHWVRQAPGQRLEWMGGINPNNGIPNYNQKFKGRATITIDTSASTAYMELRSLRSEDTAVYYCARRRIAYGYDEGHAMDYWGQGTLVTVSSGGGGSGGGGSGGGGSDIVMTQTPLSLAVTPGEQASISCKSSQSLLYSRNQKNYLAWYLQKPGQSPQLLIYWASTRESGVPDRFSGSGFGTDFTLKISGVEAEDVGVYYCQQYFSYPLTFGGGTKVEIKSGGGGSEVQLVESGGGLVQPGGSLKLSCAASGFTFNKYAMNWVRQAPGKGLEWVARIRSKYNNYATYYADSVKDRFTISRDDSKNTAYLQMNNLKTEDTAVYYCVRHGNFGNSYISYWAYWGQGTLVTVSSGGGGSGGGGSGGGGSQTVVTQEPSLTVSPGGTVTLTCGSSTGAVTSGNYPNWVQQKPGQAPRGLIGGTKFLAPGTPARFSGSLLGGKAALTLSGVQPEDEAEYYCVLWYSNRWVFGGGTKLTVL

SEQ ID NO: 1833 - DNA, 1521 bp, synthetic construct
  misc_feature 1..1521: note = FA22E8 HL x I2C HL
  source 1..1521: mol_type = other DNA
caggtgcagctggtccagtctggagctgagctggtgaagcctggggcttcagtaaaggtgtcctgcaaggcttctggatacacattcactgaatacaccatacactgggtgagacaggcccctggacagagacttgagtggatgggaggtattaatcctaacaatggtattcctaactacaatcagaagttcaagggcagggccacaataactatagacacgtccgccagcaccgcctacatggagctccgcagcctgagatctgaggatactgcggtctattactgtgcaagaagaagaatcgcctatggttacgacgagggccatgctatggactactggggtcaaggaaccctggtcaccgtctcctcaggtggtggtggttctggcggcggcggctccggtggtggtggttctgacatcgtgatgacacagactccactctccctagctgtgacacctggagagcaggcttctatcagctgcaagtccagtcagagccttttatatagtcgtaatcaaaagaactacttggcctggtacctgcagaagccagggcagtctcctcaactgctgatttactgggcatccactagggaatctggggtccctgatcgcttctcaggcagtggatttgggacggatttcactctcaagatcagcggagtggaggctgaggacgtgggagtttattactgtcagcaatattttagctatccgctcacgttcggtggtgggaccaaggtggagatcaaatccggaggtggtggatccgaggtgcagctggtcgagtctggaggaggattggtgcagcctggagggtcattgaaactctcatgtgcagcctctggattcaccttcaataagtacgccatgaactgggtccgccaggctccaggaaagggtttggaatgggttgctcgcataagaagtaaatataataattatgcaacatattatgccgattcagtgaaagacaggttcaccatctccagagatgattcaaaaaacactgcctatctacaaatgaacaacttgaaaactgaggacactgccgtgtactactgtgtgagacatgggaacttcggtaatagctacatatcctactgggcttactggggccaagggactctggtcaccgtctcctcaggtggtggtggttctggcggcggcggctccggtggtggtggttctcagactgttgtgactcaggaaccttcactcaccgtatcacctggtggaacagtcacactcacttgtggctcctcgactggggctgttacatctggcaactacccaaactgggtccaacaaaaaccaggtcaggcaccccgtggtctaataggtgggactaagttcctcgcccccggtactcctgccagattctcaggctccctgcttggaggcaaggctgccctcaccctctcaggggtacagccagaggatgaggcagaatattactgtgttctatggtacagcaaccgctgggtgttcggtggaggaaccaaactgactgtccta

SEQ ID NO: 1834 - protein, 124 aa, synthetic construct
  REGION 1..124: note = FA20H3-H
QVQLVQSGAEVKKPGASVKMSCKTSGYTFTEYTIHWVRQAPGQRLEWMGGINPNNGIPNYNQKFKGRATITRDTSSSTAYMELSSLRSEDTAVYYCARRRIAYGYDEGHAMDYWGQGTLVTVSS

SEQ ID NO: 1835 - protein, 5 aa, synthetic construct
  REGION 1..5: note = FA20H3-HCDR1
EYTIH

SEQ ID NO: 1836 - protein, 17 aa, synthetic construct
  REGION 1..17: note = FA20H3-HCDR2
GINPNNGIPNYNQKFKG

SEQ ID NO: 1837 - protein, 15 aa, synthetic construct
  REGION 1..15: note = FA20H3-HCDR3
RRIAYGYDEGHAMDY

SEQ ID NO: 1838 - DNA, 372 bp, synthetic construct
  misc_feature 1..372: note = FA20H3-H
  source 1..372: mol_type = other DNA
caggtgcagctggtccagtctggagctgaggtgaagaagcctggggcttcagtaaagatgtcctgcaagacttctggatacacattcactgaatacaccatacactgggtgagacaggcccctggacagagacttgagtggatgggaggtattaatcctaacaatggtattcctaactacaatcagaagttcaagggcagggccacaataactagagacacgtcctccagcaccgcctacatggagctcagcagcctgagatctgaggatactgcggtctattactgtgcaagaagaagaatcgcctatggttacgacgagggccatgctatggactactggggtcaaggaaccctggtcaccgtctcctca

SEQ ID NO: 1839 - protein, 113 aa, synthetic construct
  REGION 1..113: note = FA20H3-L
DIVMTQTPFSLPVTPGEPASISCKSSQSLLYSRNQKNYLAWYQQKPGQSPQLLIYWASTRESGVPDRFSGSGSGTDFTLNISRVEAEDVGVYYCQQYFSYPLTFGGGTKVEIK

SEQ ID NO: 1840 - protein, 17 aa, synthetic construct
  REGION 1..17: note = FA20H3-LCDR1
KSSQSLLYSRNQKNYLA

SEQ ID NO: 1841 - protein, 7 aa, synthetic construct
  REGION 1..7: note = FA20H3-LCDR2
WASTRES

SEQ ID NO: 1842 - protein, 9 aa, synthetic construct
  REGION 1..9: note = FA20H3-LCDR3
QQYFSYPLT

SEQ ID NO: 1843 - DNA, 339 bp, synthetic construct
  misc_feature 1..339: note = FA20H3-L
  source 1..339: mol_type = other DNA
gacatcgtgatgacacagactccattctccctacctgtgacacctggagagccggcttctatcagctgcaagtccagtcagagccttttatatagtcgtaatcaaaagaactacttggcctggtaccagcagaagccagggcagtctcctcaactgctgatttactgggcatccactagggaatctggggtccctgatcgcttctcaggcagtggatctgggacagacttcaccctcaatatctctcgtgtggaggcggaggatgttggagtctattactgtcagcaatattttagctatccgctcacgttcggtggtgggaccaaggtggagatcaaa

SEQ ID NO: 1844 - protein, 252 aa, synthetic construct
  REGION 1..252: note = FA20H3-HL
QVQLVQSGAEVKKPGASVKMSCKTSGYTFTEYTIHWVRQAPGQRLEWMGGINPNNGIPNYNQKFKGRATITRDTSSSTAYMELSSLRSEDTAVYYCARRRIAYGYDEGHAMDYWGQGTLVTVSSGGGGSGGGGSGGGGSDIVMTQTPFSLPVTPGEPASISCKSSQSLLYSRNQKNYLAWYQQKPGQSPQLLIYWASTRESGVPDRFSGSGSGTDFTLNISRVEAEDVGVYYCQQYFSYPLTFGGGTKVEIK

SEQ ID NO: 1845 - DNA, 756 bp, synthetic construct
  misc_feature 1..756: note = FA20H3-HL
  source 1..756: mol_type = other DNA
caggtgcagctggtccagtctggagctgaggtgaagaagcctggggcttcagtaaagatgtcctgcaagacttctggatacacattcactgaatacaccatacactgggtgagacaggcccctggacagagacttgagtggatgggaggtattaatcctaacaatggtattcctaactacaatcagaagttcaagggcagggccacaataactagagacacgtcctccagcaccgcctacatggagctcagcagcctgagatctgaggatactgcggtctattactgtgcaagaagaagaatcgcctatggttacgacgagggccatgctatggactactggggtcaaggaaccctggtcaccgtctcctcaggtggtggtggttctggcggcggcggctccggtggtggtggttctgacatcgtgatgacacagactccattctccctacctgtgacacctggagagccggcttctatcagctgcaagtccagtcagagccttttatatagtcgtaatcaaaagaactacttggcctggtaccagcagaagccagggcagtctcctcaactgctgatttactgggcatccactagggaatctggggtccctgatcgcttctcaggcagtggatctgggacagacttcaccctcaatatctctcgtgtggaggcggaggatgttggagtctattactgtcagcaatattttagctatccgctcacgttcggtggtgggaccaaggtggagatcaaa

SEQ ID NO: 1846 - protein, 507 aa, synthetic construct
  REGION 1..507: note = FA20H3 HL x I2C HL
QVQLVQSGAEVKKPGASVKMSCKTSGYTFTEYTIHWVRQAPGQRLEWMGGINPNNGIPNYNQKFKGRATITRDTSSSTAYMELSSLRSEDTAVYYCARRRIAYGYDEGHAMDYWGQGTLVTVSSGGGGSGGGGSGGGGSDIVMTQTPFSLPVTPGEPASISCKSSQSLLYSRNQKNYLAWYQQKPGQSPQLLIYWASTRESGVPDRFSGSGSGTDFTLNISRVEAEDVGVYYCQQYFSYPLTFGGGTKVEIKSGGGGSEVQLVESGGGLVQPGGSLKLSCAASGFTFNKYAMNWVRQAPGKGLEWVARIRSKYNNYATYYADSVKDRFTISRDDSKNTAYLQMNNLKTEDTAVYYCVRHGNFGNSYISYWAYWGQGTLVTVSSGGGGSGGGGSGGGGSQTVVTQEPSLTVSPGGTVTLTCGSSTGAVTSGNYPNWVQQKPGQAPRGLIGGTKFLAPGTPARFSGSLLGGKAALTLSGVQPEDEAEYYCVLWYSNRWVFGGGTKLTVL

SEQ ID NO: 1847 - DNA, 1521 bp, synthetic construct
  misc_feature 1..1521: note = FA20H3 HL x I2C HL
  source 1..1521: mol_type = other DNA
caggtgcagctggtccagtctggagctgaggtgaagaagcctggggcttcagtaaagatgtcctgcaagacttctggatacacattcactgaatacaccatacactgggtgagacaggcccctggacagagacttgagtggatgggaggtattaatcctaacaatggtattcctaactacaatcagaagttcaagggcagggccacaataactagagacacgtcctccagcaccgcctacatggagctcagcagcctgagatctgaggatactgcggtctattactgtgcaagaagaagaatcgcctatggttacgacgagggccatgctatggactactggggtcaaggaaccctggtcaccgtctcctcaggtggtggtggttctggcggcggcggctccggtggtggtggttctgacatcgtgatgacacagactccattctccctacctgtgacacctggagagccggcttctatcagctgcaagtccagtcagagccttttatatagtcgtaatcaaaagaactacttggcctggtaccagcagaagccagggcagtctcctcaactgctgatttactgggcatccactagggaatctggggtccctgatcgcttctcaggcagtggatctgggacagacttcaccctcaatatctctcgtgtggaggcggaggatgttggagtctattactgtcagcaatattttagctatccgctcacgttcggtggtgggaccaaggtggagatcaaatccggaggtggtggatccgaggtgcagctggtcgagtctggaggaggattggtgcagcctggagggtcattgaaactctcatgtgcagcctctggattcaccttcaataagtacgccatgaactgggtccgccaggctccaggaaagggtttggaatgggttgctcgcataagaagtaaatataataattatgcaacatattatgccgattcagtgaaagacaggttcaccatctccagagatgattcaaaaaacactgcctatctacaaatgaacaacttgaaaactgaggacactgccgtgtactactgtgtgagacatgggaacttcggtaatagctacatatcctactgggcttactggggccaagggactctggtcaccgtctcctcaggtggtggtggttctggcggcggcggctccggtggtggtggttctcagactgttgtgactcaggaaccttcactcaccgtatcacctggtggaacagtcacactcacttgtggctcctcgactggggctgttacatctggcaactacccaaactgggtccaacaaaaaccaggtcaggcaccccgtggtctaataggtgggactaagttcctcgcccccggtactcctgccagattctcaggctccctgcttggaggcaaggctgccctcaccctctcaggggtacagccagaggatgaggcagaatattactgtgttctatggtacagcaaccgctgggtgttcggtggaggaaccaaactgactgtccta

SEQ ID NO: 1848 - protein, 124 aa, synthetic construct
  REGION 1..124: note = FA19D12-H
QVQLVQSGAEVKKPGASVKVSCKASGYTFTEYTIHWVRQAHGQSLEWMGGINPNNGIPNYNQKFKGRVTITVDTSASTAYMELRSLRSEDTAVYYCARRRIAYGYDEGHAMDYWGQGTLVTVSS

SEQ ID NO: 1849 - protein, 5 aa, synthetic construct
  REGION 1..5: note = FA19D12-HCDR1
EYTIH

SEQ ID NO: 1850 - protein, 17 aa, synthetic construct
  REGION 1..17: note = FA19D12-HCDR2
GINPNNGIPNYNQKFKG

SEQ ID NO: 1851 - protein, 15 aa, synthetic construct
  REGION 1..15: note = FA19D12-HCDR3
RRIAYGYDEGHAMDY

SEQ ID NO: 1852 - DNA, 417 bp, synthetic construct
  misc_feature 1..417: note = FA19D12-H
  source 1..417: mol_type = other DNA
caggtgcagctggtccagtctggagctgaggtgaagaagcctggggcttcagtaaaggtgtcctgcaaggcttctggatacacattcactgaatacaccatacactgggtgagacaggcccatggacagagccttgagtggatgggaggtattaatcctaacaatggtattcctaactacaatcagaagttcaagggcagggtcacaataactgtagacacgtccgccagcaccgcctacatggagctccgcagcctgagatctgaggatactgcggtctattactgtgcaagaagaagaatcgcctatggttacgacgagggccatgctatggactactggggtcaaggaaccctggtcaccgtctcctcaggtggtggtggttctggcggcggcggctccggtggtggtggttct

SEQ ID NO: 1853 - protein, 113 aa, synthetic construct
  REGION 1..113: note = FA19D12-L
DIVMTQTPFSLPVTPGEPASISCKSSQSLLYSRNQKNYLAWYQQKPGQSPKLLIYWASTRESGVPDRFSGSGSGTDFTLKISRVEAEDVGVYYCQQYFSYPLTFGGGTKVEIK

SEQ ID NO: 1854 - protein, 17 aa, synthetic construct
  REGION 1..17: note = FA19D12-LCDR1
KSSQSLLYSRNQKNYLA

SEQ ID NO: 1855 - protein, 7 aa, synthetic construct
  REGION 1..7: note = FA19D12-LCDR2
WASTRES

SEQ ID NO: 1856 - protein, 9 aa, synthetic construct
  REGION 1..9: note = FA19D12-LCDR3
QQYFSYPLT

SEQ ID NO: 1857 - DNA, 339 bp, synthetic construct
  misc_feature 1..339: note = FA19D12-L
  source 1..339: mol_type = other DNA
gacatcgtgatgacacagactccattctccctacctgtgacacctggagagccggcttctatcagctgcaagtccagtcagagccttttatatagtcgtaatcaaaagaactacttggcctggtaccagcagaagccagggcagtctcctaaactgctgatttactgggcatccactagggaatctggggtccctgatcgcttctcaggcagtggatctgggacggatttcactctcaaaatctccagagtggaggctgaggacgtgggagtttattactgtcagcaatattttagctatccgctcacgttcggtggtgggaccaaggtggagatcaaa

SEQ ID NO: 1858 - protein, 252 aa, synthetic construct
  REGION 1..252: note = FA19D12-HL
QVQLVQSGAEVKKPGASVKVSCKASGYTFTEYTIHWVRQAHGQSLEWMGGINPNNGIPNYNQKFKGRVTITVDTSASTAYMELRSLRSEDTAVYYCARRRIAYGYDEGHAMDYWGQGTLVTVSSGGGGSGGGGSGGGGSDIVMTQTPFSLPVTPGEPASISCKSSQSLLYSRNQKNYLAWYQQKPGQSPKLLIYWASTRESGVPDRFSGSGSGTDFTLKISRVEAEDVGVYYCQQYFSYPLTFGGGTKVEIK

SEQ ID NO: 1859 - DNA, 756 bp, synthetic construct
  misc_feature 1..756: note = FA19D12-HL
  source 1..756: mol_type = other DNA
caggtgcagctggtccagtctggagctgaggtgaagaagcctggggcttcagtaaaggtgtcctgcaaggcttctggatacacattcactgaatacaccatacactgggtgagacaggcccatggacagagccttgagtggatgggaggtattaatcctaacaatggtattcctaactacaatcagaagttcaagggcagggtcacaataactgtagacacgtccgccagcaccgcctacatggagctccgcagcctgagatctgaggatactgcggtctattactgtgcaagaagaagaatcgcctatggttacgacgagggccatgctatggactactggggtcaaggaaccctggtcaccgtctcctcaggtggtggtggttctggcggcggcggctccggtggtggtggttctgacatcgtgatgacacagactccattctccctacctgtgacacctggagagccggcttctatcagctgcaagtccagtcagagccttttatatagtcgtaatcaaaagaactacttggcctggtaccagcagaagccagggcagtctcctaaactgctgatttactgggcatccactagggaatctggggtccctgatcgcttctcaggcagtggatctgggacggatttcactctcaaaatctccagagtggaggctgaggacgtgggagtttattactgtcagcaatattttagctatccgctcacgttcggtggtgggaccaaggtggagatcaaa

SEQ ID NO: 1860 - protein, 507 aa, synthetic construct
  REGION 1..507: note = FA19D12HL x I2C HL
QVQLVQSGAEVKKPGASVKVSCKASGYTFTEYTIHWVRQAHGQSLEWMGGINPNNGIPNYNQKFKGRVTITVDTSASTAYMELRSLRSEDTAVYYCARRRIAYGYDEGHAMDYWGQGTLVTVSSGGGGSGGGGSGGGGSDIVMTQTPFSLPVTPGEPASISCKSSQSLLYSRNQKNYLAWYQQKPGQSPKLLIYWASTRESGVPDRFSGSGSGTDFTLKISRVEAEDVGVYYCQQYFSYPLTFGGGTKVEIKSGGGGSEVQLVESGGGLVQPGGSLKLSCAASGFTFNKYAMNWVRQAPGKGLEWVARIRSKYNNYATYYADSVKDRFTISRDDSKNTAYLQMNNLKTEDTAVYYCVRHGNFGNSYISYWAYWGQGTLVTVSSGGGGSGGGGSGGGGSQTVVTQEPSLTVSPGGTVTLTCGSSTGAVTSGNYPNWVQQKPGQAPRGLIGGTKFLAPGTPARFSGSLLGGKAALTLSGVQPEDEAEYYCVLWYSNRWVFGGGTKLTVL

SEQ ID NO: 1861 - DNA, 1521 bp, synthetic construct
  misc_feature 1..1521: note = FA19D12HL x I2C HL
  source 1..1521: mol_type = other DNA
caggtgcagctggtccagtctggagctgaggtgaagaagcctggggcttcagtaaaggtgtcctgcaaggcttctggatacacattcactgaatacaccatacactgggtgagacaggcccatggacagagccttgagtggatgggaggtattaatcctaacaatggtattcctaactacaatcagaagttcaagggcagggtcacaataactgtagacacgtccgccagcaccgcctacatggagctccgcagcctgagatctgaggatactgcggtctattactgtgcaagaagaagaatcgcctatggttacgacgagggccatgctatggactactggggtcaaggaaccctggtcaccgtctcctcaggtggtggtggttctggcggcggcggctccggtggtggtggttctgacatcgtgatgacacagactccattctccctacctgtgacacctggagagccggcttctatcagctgcaagtccagtcagagccttttatatagtcgtaatcaaaagaactacttggcctggtaccagcagaagccagggcagtctcctaaactgctgatttactgggcatccactagggaatctggggtccctgatcgcttctcaggcagtggatctgggacggatttcactctcaaaatctccagagtggaggctgaggacgtgggagtttattactgtcagcaatattttagctatccgctcacgttcggtggtgggaccaaggtggagatcaaatccggaggtggtggatccgaggtgcagctggtcgagtctggaggaggattggtgcagcctggagggtcattgaaactctcatgtgcagcctctggattcaccttcaataagtacgccatgaactgggtccgccaggctccaggaaagggtttggaatgggttgctcgcataagaagtaaatataataattatgcaacatattatgccgattcagtgaaagacaggttcaccatctccagagatgattcaaaaaacactgcctatctacaaatgaacaacttgaaaactgaggacactgccgtgtactactgtgtgagacatgggaacttcggtaatagctacatatcctactgggcttactggggccaagggactctggtcaccgtctcctcaggtggtggtggttctggcggcggcggctccggtggtggtggttctcagactgttgtgactcaggaaccttcactcaccgtatcacctggtggaacagtcacactcacttgtggctcctcgactggggctgttacatctggcaactacccaaactgggtccaacaaaaaccaggtcaggcaccccgtggtctaataggtgggactaagttcctcgcccccggtactcctgccagattctcaggctccctgcttggaggcaaggctgccctcaccctctcaggggtacagccagaggatgaggcagaatattactgtgttctatggtacagcaaccgctgggtgttcggtggaggaaccaaactgactgtccta

SEQ ID NO: 1862 - protein, 124 aa, synthetic construct
  REGION 1..124: note = FA19D9-H
QVQLVQSGAEVKKPGASVKVSCKTSGYTFTEYTIHWVRQAPGQRLEWMGGINPNNGIPNYNQKFKGRATLTIDTSASTAYMELSSLTSEDTAVYYCARRRIAYGYDEGHAMDYWGQGTLVTVSS

SEQ ID NO: 1863 - protein, 5 aa, synthetic construct
  REGION 1..5: note = FA19D9-HCDR1
EYTIH

SEQ ID NO: 1864 - protein, 17 aa, synthetic construct
  REGION 1..17: note = FA19D9-HCDR2
GINPNNGIPNYNQKFKG

SEQ ID NO: 1865 - protein, 15 aa, synthetic construct
  REGION 1..15: note = FA19D9-HCDR3
RRIAYGYDEGHAMDY

SEQ ID NO: 1866 - DNA, 372 bp, synthetic construct
  misc_feature 1..372: note = FA19D9-H
  source 1..372: mol_type = other DNA
caggtgcagctggtccagtctggagctgaggtgaagaagcctggggcttcagtaaaggtgtcctgcaagacttctggatacacattcactgaatacaccatacactgggtgagacaggcccctggacagagacttgagtggatgggaggtattaatcctaacaatggtattcctaactacaatcagaagttcaagggcagggccacattaactatagacacgtccgccagcaccgcctacatggagctcagcagcctgacatctgaggatactgcggtctattactgtgcaagaagaagaatcgcctatggttacgacgagggccatgctatggactactggggtcaaggaaccctggtcaccgtctcctca

SEQ ID NO: 1867 - protein, 113 aa, synthetic construct
  REGION 1..113: note = FA19D9-L
DIVMTQTPLSLPVTPGEPASMSCKSSQSLLYSRNQKNYLAWFLQKPGQSPKLLIYWASTRESGVPDRFSGSGSGTDFTLKISRVEAEDVGVYYCQQYFSYPLTFGGGTKVEIK

SEQ ID NO: 1868 - protein, 17 aa, synthetic construct
  REGION 1..17: note = FA19D9-LCDR1
KSSQSLLYSRNQKNYLA

SEQ ID NO: 1869 - protein, 7 aa, synthetic construct
  REGION 1..7: note = FA19D9-LCDR2
WASTRES

SEQ ID NO: 1870 - protein, 9 aa, synthetic construct
  REGION 1..9: note = FA19D9-LCDR3
QQYFSYPLT

SEQ ID NO: 1871 - DNA, 339 bp, synthetic construct
  misc_feature 1..339: note = FA19D9-L
  source 1..339: mol_type = other DNA
gacatcgtgatgacacagactccactctccctacctgtgacacctggagagccggcttctatgagctgcaagtccagtcagagccttttatatagtcgtaatcaaaagaactacttggcctggttcctgcagaagccagggcagtctcctaaactgctgatttactgggcatccactagggaatctggggtccctgatcgcttctcaggcagtggatctgggacggatttcactctcaagatcagcagagtggaggctgaggacgtgggagtttattactgtcagcaatattttagctatccgctcacgttcggtggtgggaccaaggtggagatcaaa

SEQ ID NO: 1872 - protein, 252 aa, synthetic construct
  REGION 1..252: note = FA19D9-HL
QVQLVQSGAEVKKPGASVKVSCKTSGYTFTEYTIHWVRQAPGQRLEWMGGINPNNGIPNYNQKFKGRATLTIDTSASTAYMELSSLTSEDTAVYYCARRRIAYGYDEGHAMDYWGQGTLVTVSSGGGGSGGGGSGGGGSDIVMTQTPLSLPVTPGEPASMSCKSSQSLLYSRNQKNYLAWFLQKPGQSPKLLIYWASTRESGVPDRFSGSGSGTDFTLKISRVEAEDVGVYYCQQYFSYPLTFGGGTKVEIK

SEQ ID NO: 1873 - DNA, 756 bp, synthetic construct
  misc_feature 1..756: note = FA19D9-HL
  source 1..756: mol_type = other DNA
caggtgcagctggtccagtctggagctgaggtgaagaagcctggggcttcagtaaaggtgtcctgcaagacttctggatacacattcactgaatacaccatacactgggtgagacaggcccctggacagagacttgagtggatgggaggtattaatcctaacaatggtattcctaactacaatcagaagttcaagggcagggccacattaactatagacacgtccgccagcaccgcctacatggagctcagcagcctgacatctgaggatactgcggtctattactgtgcaagaagaagaatcgcctatggttacgacgagggccatgctatggactactggggtcaaggaaccctggtcaccgtctcctcaggtggtggtggttctggcggcggcggctccggtggtggtggttctgacatcgtgatgacacagactccactctccctacctgtgacacctggagagccggcttctatgagctgcaagtccagtcagagccttttatatagtcgtaatcaaaagaactacttggcctggttcctgcagaagccagggcagtctcctaaactgctgatttactgggcatccactagggaatctggggtccctgatcgcttctcaggcagtggatctgggacggatttcactctcaagatcagcagagtggaggctgaggacgtgggagtttattactgtcagcaatattttagctatccgctcacgttcggtggtgggaccaaggtggagatcaaa

SEQ ID NO: 1874 - protein, 507 aa, synthetic construct
  REGION 1..507: note = FA19D9HL x I2C HL
QVQLVQSGAEVKKPGASVKVSCKTSGYTFTEYTIHWVRQAPGQRLEWMGGINPNNGIPNYNQKFKGRATLTIDTSASTAYMELSSLTSEDTAVYYCARRRIAYGYDEGHAMDYWGQGTLVTVSSGGGGSGGGGSGGGGSDIVMTQTPLSLPVTPGEPASMSCKSSQSLLYSRNQKNYLAWFLQKPGQSPKLLIYWASTRESGVPDRFSGSGSGTDFTLKISRVEAEDVGVYYCQQYFSYPLTFGGGTKVEIKSGGGGSEVQLVESGGGLVQPGGSLKLSCAASGFTFNKYAMNWVRQAPGKGLEWVARIRSKYNNYATYYADSVKDRFTISRDDSKNTAYLQMNNLKTEDTAVYYCVRHGNFGNSYISYWAYWGQGTLVTVSSGGGGSGGGGSGGGGSQTVVTQEPSLTVSPGGTVTLTCGSSTGAVTSGNYPNWVQQKPGQAPRGLIGGTKFLAPGTPARFSGSLLGGKAALTLSGVQPEDEAEYYCVLWYSNRWVFGGGTKLTVL

SEQ ID NO: 1875 - DNA, 1521 bp, synthetic construct
  misc_feature 1..1521: note = FA19D9HL x I2C HL
  source 1..1521: mol_type = other DNA
caggtgcagctggtccagtctggagctgaggtgaagaagcctggggcttcagtaaaggtgtcctgcaagacttctggatacacattcactgaatacaccatacactgggtgagacaggcccctggacagagacttgagtggatgggaggtattaatcctaacaatggtattcctaactacaatcagaagttcaagggcagggccacattaactatagacacgtccgccagcaccgcctacatggagctcagcagcctgacatctgaggatactgcggtctattactgtgcaagaagaagaatcgcctatggttacgacgagggccatgctatggactactggggtcaaggaaccctggtcaccgtctcctcaggtggtggtggttctggcggcggcggctccggtggtggtggttctgacatcgtgatgacacagactccactctccctacctgtgacacctggagagccggcttctatgagctgcaagtccagtcagagccttttatatagtcgtaatcaaaagaactacttggcctggttcctgcagaagccagggcagtctcctaaactgctgatttactgggcatccactagggaatctggggtccctgatcgcttctcaggcagtggatctgggacggatttcactctcaagatcagcagagtggaggctgaggacgtgggagtttattactgtcagcaatattttagctatccgctcacgttcggtggtgggaccaaggtggagatcaaatccggaggtggtggatccgaggtgcagctggtcgagtctggaggaggattggtgcagcctggagggtcattgaaactctcatgtgcagcctctggattcaccttcaataagtacgccatgaactgggtccgccaggctccaggaaagggtttggaatgggttgctcgcataagaagtaaatataataattatgcaacatattatgccgattcagtgaaagacaggttcaccatctccagagatgattcaaaaaacactgcctatctacaaatgaacaacttgaaaactgaggacactgccgtgtactactgtgtgagacatgggaacttcggtaatagctacatatcctactgggcttactggggccaagggactctggtcaccgtctcctcaggtggtggtggttctggcggcggcggctccggtggtggtggttctcagactgttgtgactcaggaaccttcactcaccgtatcacctggtggaacagtcacactcacttgtggctcctcgactggggctgttacatctggcaactacccaaactgggtccaacaaaaaccaggtcaggcaccccgtggtctaataggtgggactaagttcctcgcccccggtactcctgccagattctcaggctccctgcttggaggcaaggctgccctcaccctctcaggggtacagccagaggatgaggcagaatattactgtgttctatggtacagcaaccgctgggtgttcggtggaggaaccaaactgactgtccta

SEQ ID NO: 1876 - protein, 122 aa, Mus sp.
EVQLLESGGGLVQPGGSLKLSCAASGFDFSRYWMSWVRQAPGKGLEWIGEINPDSSTINYTPSLKDKFIISRDNAKNTLYLQMSKVRSEDTALYYCAGGYYRYPYYYTMDYWGQGTTVTVSS

SEQ ID NO: 1877 - protein, 5 aa, Mus sp.
RYWMS

SEQ ID NO: 1878 - protein, 17 aa, Mus sp.
EINPDSSTINYTPSLKD

SEQ ID NO: 1879 - protein, 13 aa, Mus sp.
GYYRYPYYYTMDY

SEQ ID NO: 1880 - DNA, 366 bp, Mus sp.
  source 1..366: mol_type = genomic DNA
gaggtgcagctgctcgagtctggaggtggcctggtgcagcctggaggatccctgaaactctcctgtgcagcctcaggattcgattttagtagatactggatgagttgggtccggcaggctccagggaaagggctagaatggattggagaaattaatccagatagcagtacgataaactatacgccatctctaaaggataaattcatcatctccagagacaacgccaaaaatacgctgtacctgcaaatgagcaaagtgagatctgaggacacagccctttattactgtgcaggaggatactataggtacccatattactatactatggactactggggccaagggaccacggtcaccgtctcctca

SEQ ID NO: 1881 - protein, 107 aa, Mus sp.
ELVMTQSPASLSASVGETVTITCRASGNIHNYLAWYQQKQGKSPQLLVYNAKTLADGVPSRFSGSGSGTQYSLKINSLQPEDFGSYYCQHFWSTPYTFGGGTKLEIK

SEQ ID NO: 1882 - protein, 11 aa, Mus sp.
RASGNIHNYLA

SEQ ID NO: 1883 - protein, 7 aa, Mus sp.
NAKTLAD

SEQ ID NO: 1884 - protein, 9 aa, Mus sp.
QHFWSTPYT

SEQ ID NO: 1885 - DNA, 321 bp, Mus sp.
  source 1..321: mol_type = genomic DNA
gagctcgtgatgacacagtctccagcctccctatctgcatctgtgggagaaactgtcaccatcacatgtcgagcaagtgggaatattcacaattatttagcatggtatcagcagaaacagggaaaatctcctcagctcctggtctataatgcaaaaaccttagcagatggtgtgccatcaaggttcagtggcagtggatcaggaacacaatattctctcaagatcaacagcctgcagcctgaagattttgggagttattactgtcaacatttttggagtactccgtacacgttcggaggggggaccaagcttgagatcaaa

SEQ ID NO: 1886 - protein, 244 aa, Mus sp.
EVQLLESGGGLVQPGGSLKLSCAASGFDFSRYWMSWVRQAPGKGLEWIGEINPDSSTINYTPSLKDKFIISRDNAKNTLYLQMSKVRSEDTALYYCAGGYYRYPYYYTMDYWGQGTTVTVSSGGGGSGGGGSGGGGSELVMTQSPASLSASVGETVTITCRASGNIHNYLAWYQQKQGKSPQLLVYNAKTLADGVPSRFSGSGSGTQYSLKINSLQPEDFGSYYCQHFWSTPYTFGGGTKLEIK

SEQ ID NO: 1887 - DNA, 732 bp, Mus sp.
  source 1..732: mol_type = genomic DNA
gaggtgcagctgctcgagtctggaggtggcctggtgcagcctggaggatccctgaaactctcctgtgcagcctcaggattcgattttagtagatactggatgagttgggtccggcaggctccagggaaagggctagaatggattggagaaattaatccagatagcagtacgataaactatacgccatctctaaaggataaattcatcatctccagagacaacgccaaaaatacgctgtacctgcaaatgagcaaagtgagatctgaggacacagccctttattactgtgcaggaggatactataggtacccatattactatactatggactactggggccaagggaccacggtcaccgtctcctcaggtggtggtggttctggcggcggcggctccggtggtggtggttctgagctcgtgatgacacagtctccagcctccctatctgcatctgtgggagaaactgtcaccatcacatgtcgagcaagtgggaatattcacaattatttagcatggtatcagcagaaacagggaaaatctcctcagctcctggtctataatgcaaaaaccttagcagatggtgtgccatcaaggttcagtggcagtggatcaggaacacaatattctctcaagatcaacagcctgcagcctgaagattttgggagttattactgtcaacatttttggagtactccgtacacgttcggaggggggaccaagcttgagatcaaa

SEQ ID NO: 1888 - protein, 499 aa, Mus sp.
EVQLLESGGGLVQPGGSLKLSCAASGFDFSRYWMSWVRQAPGKGLEWIGEINPDSSTINYTPSLKDKFIISRDNAKNTLYLQMSKVRSEDTALYYCAGGYYRYPYYYTMDYWGQGTTVTVSSGGGGSGGGGSGGGGSELVMTQSPASLSASVGETVTITCRASGNIHNYLAWYQQKQGKSPQLLVYNAKTLADGVPSRFSGSGSGTQYSLKINSLQPEDFGSYYCQHFWSTPYTFGGGTKLEIKSGGGGSEVQLVESGGGLVQPGGSLKLSCAASGFTFNKYAMNWVRQAPGKGLEWVARIRSKYNNYATYYADSVKDRFTISRDDSKNTAYLQMNNLKTEDTAVYYCVRHGNFGNSYISYWAYWGQGTLVTVSSGGGGSGGGGSGGGGSQTVVTQEPSLTVSPGGTVTLTCGSSTGAVTSGNYPNWVQQKPGQAPRGLIGGTKFLAPGTPARFSGSLLGGKAALTLSGVQPEDEAEYYCVLWYSNRWVFGGGTKLTVL

SEQ ID NO: 1889 - DNA, 1497 bp, Mus sp.
  source 1..1497: mol_type = genomic DNA
gaggtgcagctgctcgagtctggaggtggcctggtgcagcctggaggatccctgaaactctcctgtgcagcctcaggattcgattttagtagatactggatgagttgggtccggcaggctccagggaaagggctagaatggattggagaaattaatccagatagcagtacgataaactatacgccatctctaaaggataaattcatcatctccagagacaacgccaaaaatacgctgtacctgcaaatgagcaaagtgagatctgaggacacagccctttattactgtgcaggaggatactataggtacccatattactatactatggactactggggccaagggaccacggtcaccgtctcctcaggtggtggtggttctggcggcggcggctccggtggtggtggttctgagctcgtgatgacacagtctccagcctccctatctgcatctgtgggagaaactgtcaccatcacatgtcgagcaagtgggaatattcacaattatttagcatggtatcagcagaaacagggaaaatctcctcagctcctggtctataatgcaaaaaccttagcagatggtgtgccatcaaggttcagtggcagtggatcaggaacacaatattctctcaagatcaacagcctgcagcctgaagattttgggagttattactgtcaacatttttggagtactccgtacacgttcggaggggggaccaagcttgagatcaaatccggaggtggtggatccgaggtgcagctggtcgagtctggaggaggattggtgcagcctggagggtcattgaaactctcatgtgcagcctctggattcaccttcaataagtacgccatgaactgggtccgccaggctccaggaaagggtttggaatgggttgctcgcataagaagtaaatataataattatgcaacatattatgccgattcagtgaaagacaggttcaccatctccagagatgattcaaaaaacactgcctatctacaaatgaacaacttgaaaactgaggacactgccgtgtactactgtgtgagacatgggaacttcggtaatagctacatatcctactgggcttactggggccaagggactctggtcaccgtctcctcaggtggtggtggttctggcggcggcggctccggtggtggtggttctcagactgttgtgactcaggaaccttcactcaccgtatcacctggtggaacagtcacactcacttgtggctcctcgactggggctgttacatctggcaactacccaaactgggtccaacaaaaaccaggtcaggcaccccgtggtctaataggtgggactaagttcctcgcccccggtactcctgccagattctcaggctccctgcttggaggcaaggctgccctcaccctctcaggggtacagccagaggatgaggcagaatattactgtgttctatggtacagcaaccgctgggtgttcggtggaggaaccaaactgactgtccta

SEQ ID NO: 1890 - protein, 122 aa, Mus sp.
EVQLLESGGGLVQPGGSLKLSCAASGFDFSRSWMSWVRQAPGKGLEWIGEINPDSSTINYTPSLKDKFIISRDNAKNTLYLQMSKVRSEDTALYYCAGGYYRYPYYYTMDYWGQGTTVTVSS

SEQ ID NO: 1891 - protein, 5 aa, Mus sp.
RSWMS

SEQ ID NO: 1892 - protein, 17 aa, Mus sp.
EINPDSSTINYTPSLKD

SEQ ID NO: 1893 - protein, 13 aa, Mus sp.
GYYRYPYYYTMDY

SEQ ID NO: 1894 - DNA, 366 bp, Mus sp.
  source 1..366: mol_type = genomic DNA
gaggtgcagctgctcgagtctggaggtggcctggtgcagcctggaggatccctgaaactctcctgtgcagcctcaggattcgattttagtagatcctggatgagttgggtccggcaggctccagggaaagggcttgaatggattggagaaattaatccagatagcagtacgataaactatacgccatctctaaaggataaattcatcatctccagagacaacgccaaaaatacgctgtacctgcaaatgagcaaagtgagatctgaggacacagccctttattactgtgcaggaggatactataggtacccatattactatactatggactactggggccaagggaccacggtcaccgtctcctca

SEQ ID NO: 1895 - protein, 107 aa, Mus sp.
ELQMTQSPASLSASVGETVTITCRASGNIHNYLAWYQQKQGKSPQLLVYNAKTLADGVPSRFSGSGSGTQYSLKINSLQPEDFGSYYCQHFWSTPYTFGGGTKLEIK

SEQ ID NO: 1896 - protein, 11 aa, Mus sp.
RASGNIHNYLA

SEQ ID NO: 1897 - protein, 7 aa, Mus sp.
NAKTLAD

SEQ ID NO: 1898 - protein, 9 aa, Mus sp.
QHFWSTPYT

SEQ ID NO: 1899 - DNA, 321 bp, Mus sp.
  source 1..321: mol_type = genomic DNA
gagctccagatgacccagtctccagcctccctatctgcatctgtgggagaaactgtcaccatcacatgtcgagcaagtgggaatattcacaattatttggcatggtatcagcagaaacagggaaaatctcctcagctcctagtctataatgcaaaaaccttagcggatggtgtgccatcaaggttcagtggcagtggatcaggaacacaatattctctcaagatcaacagcctgcagcctgaagattttgggagttattactgtcaacatttttggagtactccgtacacgttcggaggggggaccaagcttgagatcaaa

SEQ ID NO: 1900 - protein, 244 aa, Mus sp.
EVQLLESGGGLVQPGGSLKLSCAASGFDFSRSWMSWVRQAPGKGLEWIGEINPDSSTINYTPSLKDKFIISRDNAKNTLYLQMSKVRSEDTALYYCAGGYYRYPYYYTMDYWGQGTTVTVSSGGGGSGGGGSGGGGSELQMTQSPASLSASVGETVTITCRASGNIHNYLAWYQQKQGKSPQLLVYNAKTLADGVPSRFSGSGSGTQYSLKINSLQPEDFGSYYCQHFWSTPYTFGGGTKLEIK

SEQ ID NO: 1901 - DNA, 732 bp, Mus sp.
  source 1..732: mol_type = genomic DNA
gaggtgcagctgctcgagtctggaggtggcctggtgcagcctggaggatccctgaaactctcctgtgcagcctcaggattcgattttagtagatcctggatgagttgggtccggcaggctccagggaaagggcttgaatggattggagaaattaatccagatagcagtacgataaactatacgccatctctaaaggataaattcatcatctccagagacaacgccaaaaatacgctgtacctgcaaatgagcaaagtgagatctgaggacacagccctttattactgtgcaggaggatactataggtacccatattactatactatggactactggggccaagggaccacggtcaccgtctcctcaggtggtggtggttctggcggcggcggctccggtggtggtggttctgagctccagatgacccagtctccagcctccctatctgcatctgtgggagaaactgtcaccatcacatgtcgagcaagtgggaatattcacaattatttggcatggtatcagcagaaacagggaaaatctcctcagctcctagtctataatgcaaaaaccttagcggatggtgtgccatcaaggttcagtggcagtggatcaggaacacaatattctctcaagatcaacagcctgcagcctgaagattttgggagttattactgtcaacatttttggagtactccgtacacgttcggaggggggaccaagcttgagatcaaa

SEQ ID NO: 1902 - protein, 499 aa, Mus sp.
EVQLLESGGGLVQPGGSLKLSCAASGFDFSRSWMSWVRQAPGKGLEWIGEINPDSSTINYTPSLKDKFIISRDNAKNTLYLQMSKVRSEDTALYYCAGGYYRYPYYYTMDYWGQGTTVTVSSGGGGSGGGGSGGGGSELQMTQSPASLSASVGETVTITCRASGNIHNYLAWYQQKQGKSPQLLVYNAKTLADGVPSRFSGSGSGTQYSLKINSLQPEDFGSYYCQHFWSTPYTFGGGTKLEIKSGGGGSEVQLVESGGGLVQPGGSLKLSCAASGFTFNKYAMNWVRQAPGKGLEWVARIRSKYNNYATYYADSVKDRFTISRDDSKNTAYLQMNNLKTEDTAVYYCVRHGNFGNSYISYWAYWGQGTLVTVSSGGGGSGGGGSGGGGSQTVVTQEPSLTVSPGGTVTLTCGSSTGAVTSGNYPNWVQQKPGQAPRGLIGGTKFLAPGTPARFSGSLLGGKAALTLSGVQPEDEAEYYCVLWYSNRWVFGGGTKLTVL

SEQ ID NO: 1903 - DNA, 1497 bp, Mus sp.
  source 1..1497: mol_type = genomic DNA
gaggtgcagctgctcgagtctggaggtggcctggtgcagcctggaggatccctgaaactctcctgtgcagcctcaggattcgattttagtagatcctggatgagttgggtccggcaggctccagggaaagggcttgaatggattggagaaattaatccagatagcagtacgataaactatacgccatctctaaaggataaattcatcatctccagagacaacgccaaaaatacgctgtacctgcaaatgagcaaagtgagatctgaggacacagccctttattactgtgcaggaggatactataggtacccatattactatactatggactactggggccaagggaccacggtcaccgtctcctcaggtggtggtggttctggcggcggcggctccggtggtggtggttctgagctccagatgacccagtctccagcctccctatctgcatctgtgggagaaactgtcaccatcacatgtcgagcaagtgggaatattcacaattatttggcatggtatcagcagaaacagggaaaatctcctcagctcctagtctataatgcaaaaaccttagcggatggtgtgccatcaaggttcagtggcagtggatcaggaacacaatattctctcaagatcaacagcctgcagcctgaagattttgggagttattactgtcaacatttttggagtactccgtacacgttcggaggggggaccaagcttgagatcaaatccggaggtggtggatccgaggtgcagctggtcgagtctggaggaggattggtgcagcctggagggtcattgaaactctcatgtgcagcctctggattcaccttcaataagtacgccatgaactgggtccgccaggctccaggaaagggtttggaatgggttgctcgcataagaagtaaatataataattatgcaacatattatgccgattcagtgaaagacaggttcaccatctccagagatgattcaaaaaacactgcctatctacaaatgaacaacttgaaaactgaggacactgccgtgtactactgtgtgagacatgggaacttcggtaatagctacatatcctactgggcttactggggccaagggactctggtcaccgtctcctcaggtggtggtggttctggcggcggcggctccggtggtggtggttctcagactgttgtgactcaggaaccttcactcaccgtatcacctggtggaacagtcacactcacttgtggctcctcgactggggctgttacatctggcaactacccaaactgggtccaacaaaaaccaggtcaggcaccccgtggtctaataggtgggactaagttcctcgcccccggtactcctgccagattctcaggctccctgcttggaggcaaggctgccctcaccctctcaggggtacagccagaggatgaggcagaatattactgtgttctatggtacagcaaccgctgggtgttcggtggaggaaccaaactgactgtccta

SEQ ID NO: 1904 - protein, 122 aa, Mus sp.
EVQLLESGGGLVQPGGSLKLSCAASGFDFSTYWMSWVRQAPGKGLEWIGEINPDSSTINYTPSLKDKFIISRDNAKNTLYLQMNKVRSEDTALYYCAGGYYRYPYYYTMDYWGQGTTVTVSS

SEQ ID NO: 1905 - protein, 5 aa, Mus sp.
TYWMS

SEQ ID NO: 1906 - protein, 17 aa, Mus sp.
EINPDSSTINYTPSLKD

SEQ ID NO: 1907 - protein, 13 aa, Mus sp.
GYYRYPYYYTMDY

SEQ ID NO: 1908 - DNA, 366 bp, Mus sp.
  source 1..366: mol_type = genomic DNA
gaggtgcagctgctcgagtctggaggtggcctggtgcagcctggaggatccctgaaactctcctgtgcagcctcaggattcgattttagtacatactggatgagttgggtccggcaggctccagggaaagggctagaatggattggagaaattaatccagatagcagtacgataaactatacgccatctctaaaggataaattcatcatctccagagacaacgccaaaaatacgctgtacctgcaaatgaacaaagtgagatctgaggacacagccctttattactgtgcaggaggatactataggtacccatattactatactatggactactggggccaagggaccacggtcaccgtctcctca

SEQ ID NO: 1909 - protein, 107 aa, Mus sp.; identical to SEQ ID NO: 1881

SEQ ID NO: 1910 - protein, 11 aa, Mus sp.
RASGNIHNYLA

SEQ ID NO: 1911 - protein, 7 aa, Mus sp.
NAKTLAD

SEQ ID NO: 1912 - protein, 9 aa, Mus sp.
QHFWSTPYT

SEQ ID NO: 1913 - DNA, 321 bp, Mus sp.
  source 1..321: mol_type = genomic DNA
gagctcgtcatgacccagtctccagcctccctatctgcatctgtgggagaaactgtcaccatcacatgtcgagcaagtgggaatattcacaattatttagcatggtatcagcagaaacagggaaaatctcctcagctcctggtctataatgcaaaaaccttagcagatggtgtgccatcaaggttcagtggcagtggatcaggaacacaatattctctcaagatcaacagcctgcagcctgaagattttgggagttattactgtcaacatttttggagtactccgtacacgttcggaggggggaccaagcttgagatcaaa

SEQ ID NO: 1914 - protein, 244 aa, Mus sp.
EVQLLESGGGLVQPGGSLKLSCAASGFDFSTYWMSWVRQAPGKGLEWIGEINPDSSTINYTPSLKDKFIISRDNAKNTLYLQMNKVRSEDTALYYCAGGYYRYPYYYTMDYWGQGTTVTVSSGGGGSGGGGSGGGGSELVMTQSPASLSASVGETVTITCRASGNIHNYLAWYQQKQGKSPQLLVYNAKTLADGVPSRFSGSGSGTQYSLKINSLQPEDFGSYYCQHFWSTPYTFGGGTKLEIK

SEQ ID NO: 1915 - DNA, 732 bp, Mus sp.
  source 1..732: mol_type = genomic DNA
gaggtgcagctgctcgagtctggaggtggcctggtgcagcctggaggatccctgaaactctcctgtgcagcctcaggattcgattttagtacatactggatgagttgggtccggcaggctccagggaaagggctagaatggattggagaaattaatccagatagcagtacgataaactatacgccatctctaaaggataaattcatcatctccagagacaacgccaaaaatacgctgtacctgcaaatgaacaaagtgagatctgaggacacagccctttattactgtgcaggaggatactataggtacccatattactatactatggactactggggccaagggaccacggtcaccgtctcctcaggtggtggtggttctggcggcggcggctccggtggtggtggttctgagctcgtcatgacccagtctccagcctccctatctgcatctgtgggagaaactgtcaccatcacatgtcgagcaagtgggaatattcacaattatttagcatggtatcagcagaaacagggaaaatctcctcagctcctggtctataatgcaaaaaccttagcagatggtgtgccatcaaggttcagtggcagtggatcaggaacacaatattctctcaagatcaacagcctgcagcctgaagattttgggagttattactgtcaacatttttggagtactccgtacacgttcggaggggggaccaagcttgagatcaaa

SEQ ID NO: 1916 - protein, 499 aa, Mus sp.
EVQLLESGGGLVQPGGSLKLSCAASGFDFSTYWMSWVRQAPGKGLEWIGEINPDSSTINYTPSLKDKFIISRDNAKNTLYLQMNKVRSEDTALYYCAGGYYRYPYYYTMDYWGQGTTVTVSSGGGGSGGGGSGGGGSELVMTQSPASLSASVGETVTITCRASGNIHNYLAWYQQKQGKSPQLLVYNAKTLADGVPSRFSGSGSGTQYSLKINSLQPEDFGSYYCQHFWSTPYTFGGGTKLEIKSGGGGSEVQLVESGGGLVQPGGSLKLSCAASGFTFNKYAMNWVRQAPGKGLEWVARIRSKYNNYATYYADSVKDRFTISRDDSKNTAYLQMNNLKTEDTAVYYCVRHGNFGNSYISYWAYWGQGTLVTVSSGGGGSGGGGSGGGGSQTVVTQEPSLTVSPGGTVTLTCGSSTGAVTSGNYPNWVQQKPGQAPRGLIGGTKFLAPGTPARFSGSLLGGKAALTLSGVQPEDEAEYYCVLWYSNRWVFGGGTKLTVL

SEQ ID NO: 1917 - DNA, 1497 bp, Mus sp.
  source 1..1497: mol_type = genomic DNA
gaggtgcagctgctcgagtctggaggtggcctggtgcagcctggaggatccctgaaactctcctgtgcagcctcaggattcgattttagtacatactggatgagttgggtccggcaggctccagggaaagggctagaatggattggagaaattaatccagatagcagtacgataaactatacgccatctctaaaggataaattcatcatctccagagacaacgccaaaaatacgctgtacctgcaaatgaacaaagtgagatctgaggacacagccctttattactgtgcaggaggatactataggtacccatattactatactatggactactggggccaagggaccacggtcaccgtctcctcaggtggtggtggttctggcggcggcggctccggtggtggtggttctgagctcgtcatgacccagtctccagcctccctatctgcatctgtgggagaaactgtcaccatcacatgtcgagcaagtgggaatattcacaattatttagcatggtatcagcagaaacagggaaaatctcctcagctcctggtctataatgcaaaaaccttagcagatggtgtgccatcaaggttcagtggcagtggatcaggaacacaatattctctcaagatcaacagcctgcagcctgaagattttgggagttattactgtcaacatttttggagtactccgtacacgttcggaggggggaccaagcttgagatcaaatccggaggtggtggatccgaggtgcagctggtcgagtctggaggaggattggtgcagcctggagggtcattgaaactctcatgtgcagcctctggattcaccttcaataagtacgccatgaactgggtccgccaggctccaggaaagggtttggaatgggttgctcgcataagaagtaaatataataattatgcaacatattatgccgattcagtgaaagacaggttcaccatctccagagatgattcaaaaaacactgcctatctacaaatgaacaacttgaaaactgaggacactgccgtgtactactgtgtgagacatgggaacttcggtaatagctacatatcctactgggcttactggggccaagggactctggtcaccgtctcctcaggtggtggtggttctggcggcggcggctccggtggtggtggttctcagactgttgtgactcaggaaccttcactcaccgtatcacctggtggaacagtcacactcacttgtggctcctcgactggggctgttacatctggcaactacccaaactgggtccaacaaaaaccaggtcaggcaccccgtggtctaataggtgggactaagttcctcgcccccggtactcctgccagattctcaggctccctgcttggaggcaaggctgccctcaccctctcaggggtacagccagaggatgaggcagaatattactgtgttctatggtacagcaaccgctgggtgttcggtggaggaaccaaactgactgtccta

SEQ ID NO: 1918 - protein, 122 aa, Mus sp.
EVQLLESGGGLVQPGGSLKLSCAASGFDFSTYWMSWVRQAPGKGLEWIGEINPDSSTINYTPSLKDKFIISRDNAKNTLYLQMTKVRPEDTALYYCAGGYYRYPYYYTMDYWGQGTTVTVSS

SEQ ID NO: 1919 - protein, 5 aa, Mus sp.
TYWMS

SEQ ID NO: 1920 - protein, 17 aa, Mus sp.
EINPDSSTINYTPSLKD

SEQ ID NO: 1921 - protein, 13 aa, Mus sp.
GYYRYPYYYTMDY

SEQ ID NO: 1922 - DNA, 366 bp, Mus sp.
  source 1..366: mol_type = genomic DNA
gaggtgcagctgctcgagtctggaggtggcctggtgcagcctggaggatccctgaaactctcctgtgcagcctcaggattcgattttagtacatactggatgagttgggtccggcaggctccagggaaagggctagaatggattggagaaattaatccagatagcagtacgataaactatacgccatctctaaaggataaattcatcatctccagagacaacgccaaaaatacgctgtacctgcaaatgaccaaagtgagacctgaggacacagccctttattactgtgcaggaggatactataggtacccatattactatactatggactactggggccaagggaccacggtcaccgtctcctca

SEQ ID NO: 1923 - protein, 107 aa, Mus sp.
ELVMTQSPASLSASVGETVTITCRASGSIHNYLAWYQQKQGKSPQLLVYNAKTLADGVPSRFSGSGSGTQYSLKINSLQPEDFGSYYCQHFWSTPYTFGGGTKLEIK

SEQ ID NO: 1924 - protein, 11 aa, Mus sp.
RASGSIHNYLA

SEQ ID NO: 1925 - protein, 7 aa, Mus sp.
NAKTLAD

SEQ ID NO: 1926 - protein, 9 aa, Mus sp.
QHFWSTPYT

SEQ ID NO: 1927 - DNA, 321 bp, Mus sp.
  source 1..321: mol_type = genomic DNA
gagctcgtcatgacccagtctccagcctccctatctgcatctgtgggagaaactgtcaccatcacatgtcgagcaagtgggagtattcacaattatttagcatggtatcagcagaaacagggaaaatctcctcagctcctggtctataatgcaaaaaccttagcagatggtgtgccatcaaggttcagtggcagtggatcaggaacacaatattctctcaagatcaacagcctgcagcctgaagattttgggagttattactgtcaacatttttggagtactccgtacacgttcggaggggggaccaagcttgagatcaaa

SEQ ID NO: 1928 - protein, 244 aa, Mus sp.
EVQLLESGGGLVQPGGSLKLSCAASGFDFSTYWMSWVRQAPGKGLEWIGEINPDSSTINYTPSLKDKFIISRDNAKNTLYLQMTKVRPEDTALYYCAGGYYRYPYYYTMDYWGQGTTVTVSSGGGGSGGGGSGGGGSELVMTQSPASLSASVGETVTITCRASGSIHNYLAWYQQKQGKSPQLLVYNAKTLADGVPSRFSGSGSGTQYSLKINSLQPEDFGSYYCQHFWSTPYTFGGGTKLEIK

SEQ ID NO: 1929 - DNA, 732 bp, Mus sp.
  source 1..732: mol_type = genomic DNA
gaggtgcagctgctcgagtctggaggtggcctggtgcagcctggaggatccctgaaactctcctgtgcagcctcaggattcgattttagtacatactggatgagttgggtccggcaggctccagggaaagggctagaatggattggagaaattaatccagatagcagtacgataaactatacgccatctctaaaggataaattcatcatctccagagacaacgccaaaaatacgctgtacctgcaaatgaccaaagtgagacctgaggacacagccctttattactgtgcaggaggatactataggtacccatattactatactatggactactggggccaagggaccacggtcaccgtctcctcaggtggtggtggttctggcggcggcggctccggtggtggtggttctgagctcgtcatgacccagtctccagcctccctatctgcatctgtgggagaaactgtcaccatcacatgtcgagcaagtgggagtattcacaattatttagcatggtatcagcagaaacagggaaaatctcctcagctcctggtctataatgcaaaaaccttagcagatggtgtgccatcaaggttcagtggcagtggatcaggaacacaatattctctcaagatcaacagcctgcagcctgaagattttgggagttattactgtcaacatttttggagtactccgtacacgttcggaggggggaccaagcttgagatcaaa

SEQ ID NO: 1930 - protein, 499 aa, Mus sp.
EVQLLESGGGLVQPGGSLKLSCAASGFDFSTYWMSWVRQAPGKGLEWIGEINPDSSTINYTPSLKDKFIISRDNAKNTLYLQMTKVRPEDTALYYCAGGYYRYPYYYTMDYWGQGTTVTVSSGGGGSGGGGSGGGGSELVMTQSPASLSASVGETVTITCRASGSIHNYLAWYQQKQGKSPQLLVYNAKTLADGVPSRFSGSGSGTQYSLKINSLQPEDFGSYYCQHFWSTPYTFGGGTKLEIKSGGGGSEVQLVESGGGLVQPGGSLKLSCAASGFTFNKYAMNWVRQAPGKGLEWVARIRSKYNNYATYYADSVKDRFTISRDDSKNTAYLQMNNLKTEDTAVYYCVRHGNFGNSYISYWAYWGQGTLVTVSSGGGGSGGGGSGGGGSQTVVTQEPSLTVSPGGTVTLTCGSSTGAVTSGNYPNWVQQKPGQAPRGLIGGTKFLAPGTPARFSGSLLGGKAALTLSGVQPEDEAEYYCVLWYSNRWVFGGGTKLTVL

SEQ ID NO: 1931 - DNA, 1497 bp, Mus sp.
  source 1..1497: mol_type = genomic DNA
gaggtgcagctgctcgagtctggaggtggcctggtgcagcctggaggatccctgaaactctcctgtgcagcctcaggattcgattttagtacatactggatgagttgggtccggcaggctccagggaaagggctagaatggattggagaaattaatccagatagcagtacgataaactatacgccatctctaaaggataaattcatcatctccagagacaacgccaaaaatacgctgtacctgcaaatgaccaaagtgagacctgaggacacagccctttattactgtgcaggaggatactataggtacccatattactatactatggactactggggccaagggaccacggtcaccgtctcctcaggtggtggtggttctggcggcggcggctccggtggtggtggttctgagctcgtcatgacccagtctccagcctccctatctgcatctgtgggagaaactgtcaccatcacatgtcgagcaagtgggagtattcacaattatttagcatggtatcagcagaaacagggaaaatctcctcagctcctggtctataatgcaaaaaccttagcagatggtgtgccatcaaggttcagtggcagtggatcaggaacacaatattctctcaagatcaacagcctgcagcctgaagattttgggagttattactgtcaacatttttggagtactccgtacacgttcggaggggggaccaagcttgagatcaaatccggaggtggtggatccgaggtgcagctggtcgagtctggaggaggattggtgcagcctggagggtcattgaaactctcatgtgcagcctctggattcaccttcaataagtacgccatgaactgggtccgccaggctccaggaaagggtttggaatgggttgctcgcataagaagtaaatataataattatgcaacatattatgccgattcagtgaaagacaggttcaccatctccagagatgattcaaaaaacactgcctatctacaaatgaacaacttgaaaactgaggacactgccgtgtactactgtgtgagacatgggaacttcggtaatagctacatatcctactgggcttactggggccaagggactctggtcaccgtctcctcaggtggtggtggttctggcggcggcggctccggtggtggtggttctcagactgttgtgactcaggaaccttcactcaccgtatcacctggtggaacagtcacactcacttgtggctcctcgactggggctgttacatctggcaactacccaaactgggtccaacaaaaaccaggtcaggcaccccgtggtctaataggtgggactaagttcctcgcccccggtactcctgccagattctcaggctccctgcttggaggcaaggctgccctcaccctctcaggggtacagccagaggatgaggcagaatattactgtgttctatggtacagcaaccgctgggtgttcggtggaggaaccaaactgactgtccta

SEQ ID NO: 1932 - protein, 122 aa, Mus sp.; identical to SEQ ID NO: 1890

SEQ ID NO: 1933 - protein, 5 aa, Mus sp.
RSWMS

SEQ ID NO: 1934 - protein, 17 aa, Mus sp.
EINPDSSTINYTPSLKD

SEQ ID NO: 1935 - protein, 13 aa, Mus sp.
GYYRYPYYYTMDY

SEQ ID NO: 1936 - DNA, 366 bp, Mus sp.; identical to SEQ ID NO: 1894
  source 1..366: mol_type = genomic DNA

SEQ ID NO: 1937 - protein, 107 aa, Mus sp.
ELQMTQSPASLSASVGETVTITCRASENIYSYLAWYQQKQGKSPQLLVYNAKTLAEGVPSRFSGSGSRTQYSLKINSLQPEDFGSYYCQHFWSTPYTFGGGTKLEIK

SEQ ID NO: 1938 - protein, 11 aa, Mus sp.
RASENIYSYLA

SEQ ID NO: 1939 - protein, 7 aa, Mus sp.
NAKTLAE

SEQ ID NO: 1940 - protein, 9 aa, Mus sp.
QHFWSTPYT

SEQ ID NO: 1941 - DNA, 321 bp, Mus sp.
  source 1..321: mol_type = genomic DNA
gagctccagatgacccagtctccagcctccctatctgcatctgtgggagaaactgtcaccatcacatgtcgagcaagtgagaatatttacagttatttagcatggtatcagcagaaacagggaaaatctcctcagctcctggtctataatgcaaaaaccttagcagaaggtgtgccatcaaggttcagtggcagtggatcaagaacacaatattctctcaagatcaacagcctgcagcctgaagattttgggagttattactgtcaacatttttggagtactccgtacacgttcggaggggggaccaagcttgagatcaaa

SEQ ID NO: 1942 - protein, 244 aa, Mus sp.
EVQLLESGGGLVQPGGSLKLSCAASGFDFSRSWMSWVRQAPGKGLEWIGEINPDSSTINYTPSLKDKFIISRDNAKNTLYLQMSKVRSEDTALYYCAGGYYRYPYYYTMDYWGQGTTVTVSSGGGGSGGGGSGGGGSELQMTQSPASLSASVGETVTITCRASENIYSYLAWYQQKQGKSPQLLVYNAKTLAEGVPSRFSGSGSRTQYSLKINSLQPEDFGSYYCQHFWSTPYTFGGGTKLEIK

SEQ ID NO: 1943 - DNA, 732 bp, Mus sp.
  source 1..732: mol_type = genomic DNA
gaggtgcagctgctcgagtctggaggtggcctggtgcagcctggaggatccctgaaactctcctgtgcagcctcaggattcgattttagtagatcctggatgagttgggtccggcaggctccagggaaagggcttgaatggattggagaaattaatccagatagcagtacgataaactatacgccatctctaaaggataaattcatcatctccagagacaacgccaaaaatacgctgtacctgcaaatgagcaaagtgagatctgaggacacagccctttattactgtgcaggaggatactataggtacccatattactatactatggactactggggccaagggaccacggtcaccgtctcctcaggtggtggtggttctggcggcggcggctccggtggtggtggttctgagctccagatgacccagtctccagcctccctatctgcatctgtgggagaaactgtcaccatcacatgtcgagcaagtgagaatatttacagttatttagcatggtatcagcagaaacagggaaaatctcctcagctcctggtctataatgcaaaaaccttagcagaaggtgtgccatcaaggttcagtggcagtggatcaagaacacaatattctctcaagatcaacagcctgcagcctgaagattttgggagttattactgtcaacatttttggagtactccgtacacgttcggaggggggaccaagcttgagatcaaa

SEQ ID NO: 1944 - protein, 499 aa, Mus sp.
EVQLLESGGGLVQPGGSLKLSCAASGFDFSRSWMSWVRQAPGKGLEWIGEINPDSSTINYTPSLKDKFIISRDNAKNTLYLQMSKVRSEDTALYYCAGGYYRYPYYYTMDYWGQGTTVTVSSGGGGSGGGGSGGGGSELQMTQSPASLSASVGETVTITCRASENIYSYLAWYQQKQGKSPQLLVYNAKTLAEGVPSRFSGSGSRTQYSLKINSLQPEDFGSYYCQHFWSTPYTFGGGTKLEIKSGGGGSEVQLVESGGGLVQPGGSLKLSCAASGFTFNKYAMNWVRQAPGKGLEWVARIRSKYNNYATYYADSVKDRFTISRDDSKNTAYLQMNNLKTEDTAVYYCVRHGNFGNSYISYWAYWGQGTLVTVSSGGGGSGGGGSGGGGSQTVVTQEPSLTVSPGGTVTLTCGSSTGAVTSGNYPNWVQQKPGQAPRGLIGGTKFLAPGTPARFSGSLLGGKAALTLSGVQPEDEAEYYCVLWYSNRWVFGGGTKLTVL

SEQ ID NO: 1945 - DNA, 1497 bp, Mus sp.
  source 1..1497: mol_type = genomic DNA
gaggtgcagctgctcgagtctggaggtggcctggtgcagcctggaggatccctgaaactctcctgtgcagcctcaggattcgattttagtagatcctggatgagttgggtccggcaggctccagggaaagggcttgaatggattggagaaattaatccagatagcagtacgataaactatacgccatctctaaaggataaattcatcatctccagagacaacgccaaaaatacgctgtacctgcaaatgagcaaagtgagatctgaggacacagccctttattactgtgcaggaggatactataggtacccatattactatactatggactactggggccaagggaccacggtcaccgtctcctcaggtggtggtggttctggcggcggcggctccggtggtggtggttctgagctccagatgacccagtctccagcctccctatctgcatctgtgggagaaactgtcaccatcacatgtcgagcaagtgagaatatttacagttatttagcatggtatcagcagaaacagggaaaatctcctcagctcctggtctataatgcaaaaaccttagcagaaggtgtgccatcaaggttcagtggcagtggatcaagaacacaatattctctcaagatcaacagcctgcagcctgaagattttgggagttattactgtcaacatttttggagtactccgtacacgttcggaggggggaccaagcttgagatcaaatccggaggtggtggatccgaggtgcagctggtcgagtctggaggaggattggtgcagcctggagggtcattgaaactctcatgtgcagcctctggattcaccttcaataagtacgccatgaactgggtccgccaggctccaggaaagggtttggaatgggttgctcgcataagaagtaaatataataattatgcaacatattatgccgattcagtgaaagacaggttcaccatctccagagatgattcaaaaaacactgcctatctacaaatgaacaacttgaaaactgaggacactgccgtgtactactgtgtgagacatgggaacttcggtaatagctacatatcctactgggcttactggggccaagggactctggtcaccgtctcctcaggtggtggtggttctggcggcggcggctccggtggtggtggttctcagactgttgtgactcaggaaccttcactcaccgtatcacctggtggaacagtcacactcacttgtggctcctcgactggggctgttacatctggcaactacccaaactgggtccaacaaaaaccaggtcaggcaccccgtggtctaataggtgggactaagttcctcgcccccggtactcctgccagattctcaggctccctgcttggaggcaaggctgccctcaccctctcaggggtacagccagaggatgaggcagaatattactgtgttctatggtacagcaaccgctgggtgttcggtggaggaaccaaactgactgtccta

SEQ ID NO: 1946 - protein, 122 aa, Mus sp.
EVQLLESGGGLVQPGGSLKLSCAASGFDFSTYWMSWVRQAPGKGLEWIGEINPDSSTINYTPSLKDKFIISRDNAKNTLYLQMNKVRSDDTALYYCAGGYYRYPYYYTMDYWGQGTTVTVSS

SEQ ID NO: 1947 - protein, 5 aa, Mus sp.
TYWMS

SEQ ID NO: 1948 - protein, 17 aa, Mus sp.
EINPDSSTINYTPSLKD

SEQ ID NO: 1949 - protein, 13 aa, Mus sp.
GYYRYPYYYTMDY

SEQ ID NO: 1950 - DNA, 366 bp, Mus sp.
  source 1..366: mol_type = genomic DNA
gaggtgcagctgctcgagtctggaggtggcctggtgcagcctggaggatccctgaaactctcctgtgcagcctcaggattcgattttagtacatactggatgagttgggtccggcaggctccagggaaagggctagaatggattggagaaattaatccagatagcagtacgataaactatacgccatctctaaaggataaattcatcatctccagagacaacgccaaaaatacgctgtacctgcaaatgaacaaagtgagatctgacgacacagccctttattactgtgcaggaggatactataggtacccatattactatactatggactactggggccaagggaccacggtcaccgtctcctca

SEQ ID NO: 1951 - protein, 107 aa, Mus sp.
ELVMTQSPSSLSASVGETVTITCRASGNIHNYLAWYQQKQGKSPQLLVYNAKTLADGVPSRFSGSGSGTQYSLKINSLQPEDFGSYYCQHFWSTPYTFGGGTKLEIK

SEQ ID NO: 1952 - protein, 11 aa, Mus sp.
RASGNIHNYLA

SEQ ID NO: 1953 - protein, 7 aa, Mus sp.
NAKTLAD

SEQ ID NO: 1954 - protein, 9 aa, Mus sp.
QHFWSTPYT

SEQ ID NO: 1955 - DNA, 321 bp, Mus sp.
  source 1..321: mol_type = genomic DNA
gagctcgtgatgacacagtctccatcctccttatctgcatctgtgggagaaactgtcaccatcacatgtcgagcaagtgggaatattcacaattatttagcatggtatcagcagaaacagggaaaatctcctcagctcctggtctataatgcaaaaaccttagcagatggtgtgccatcaaggttcagtggcagtggatcaggaacacaatattctctcaagatcaacagcctgcagcctgaagattttgggagttattactgtcaacatttttggagtactccgtacacgttcggaggggggaccaagcttgagatcaaa

SEQ ID NO: 1956 - protein, 244 aa, Mus sp.
EVQLLESGGGLVQPGGSLKLSCAASGFDFSTYWMSWVRQAPGKGLEWIGEINPDSSTINYTPSLKDKFIISRDNAKNTLYLQMNKVRSDDTALYYCAGGYYRYPYYYTMDYWGQGTTVTVSSGGGGSGGGGSGGGGSELVMTQSPSSLSASVGETVTITCRASGNIHNYLAWYQQKQGKSPQLLVYNAKTLADGVPSRFSGSGSGTQYSLKINSLQPEDFGSYYCQHFWSTPYTFGGGTKLEIK

SEQ ID NO: 1957 - DNA, 732 bp, Mus sp.
  source 1..732: mol_type = genomic DNA
gaggtgcagctgctcgagtctggaggtggcctggtgcagcctggaggatccctgaaactctcctgtgcagcctcaggattcgattttagtacatactggatgagttgggtccggcaggctccagggaaagggctagaatggattggagaaattaatccagatagcagtacgataaactatacgccatctctaaaggataaattcatcatctccagagacaacgccaaaaatacgctgtacctgcaaatgaacaaagtgagatctgacgacacagccctttattactgtgcaggaggatactataggtacccatattactatactatggactactggggccaagggaccacggtcaccgtctcctcaggtggtggtggttctggcggcggcggctccggtggtggtggttctgagctcgtgatgacacagtctccatcctccttatctgcatctgtgggagaaactgtcaccatcacatgtcgagcaagtgggaatattcacaattatttagcatggtatcagcagaaacagggaaaatctcctcagctcctggtctataatgcaaaaaccttagcagatggtgtgccatcaaggttcagtggcagtggatcaggaacacaatattctctcaagatcaacagcctgcagcctgaagattttgggagttattactgtcaacatttttggagtactccgtacacgttcggaggggggaccaagcttgagatcaaa

SEQ ID NO: 1958 - protein, 499 aa, Mus sp.
EVQLLESGGGLVQPGGSLKLSCAASGFDFSTYWMSWVRQAPGKGLEWIGEINPDSSTINYTPSLKDKFIISRDNAKNTLYLQMNKVRSDDTALYYCAGGYYRYPYYYTMDYWGQGTTVTVSSGGGGSGGGGSGGGGSELVMTQSPSSLSASVGETVTITCRASGNIHNYLAWYQQKQGKSPQLLVYNAKTLADGVPSRFSGSGSGTQYSLKINSLQPEDFGSYYCQHFWSTPYTFGGGTKLEIKSGGGGSEVQLVESGGGLVQPGGSLKLSCAASGFTFNKYAMNWVRQAPGKGLEWVARIRSKYNNYATYYADSVKDRFTISRDDSKNTAYLQMNNLKTEDTAVYYCVRHGNFGNSYISYWAYWGQGTLVTVSSGGGGSGGGGSGGGGSQTVVTQEPSLTVSPGGTVTLTCGSSTGAVTSGNYPNWVQQKPGQAPRGLIGGTKFLAPGTPARFSGSLLGGKAALTLSGVQPEDEAEYYCVLWYSNRWVFGGGTKLTVL

SEQ ID NO: 1959 - DNA, 1497 bp, Mus sp.
  source 1..1497: mol_type = genomic DNA
gaggtgcagctgctcgagtctggaggtggcctggtgcagcctggaggatccctgaaactctcctgtgcagcctcaggattcgattttagtacatactggatgagttgggtccggcaggctccagggaaagggctagaatggattggagaaattaatccagatagcagtacgataaactatacgccatctctaaaggataaattcatcatctccagagacaacgccaaaaatacgctgtacctgcaaatgaacaaagtgagatctgacgacacagccctttattactgtgcaggaggatactataggtacccatattactatactatggactactggggccaagggaccacggtcaccgtctcctcaggtggtggtggttctggcggcggcggctccggtggtggtggttctgagctcgtgatgacacagtctccatcctccttatctgcatctgtgggagaaactgtcaccatcacatgtcgagcaagtgggaatattcacaattatttagcatggtatcagcagaaacagggaaaatctcctcagctcctggtctataatgcaaaaaccttagcagatggtgtgccatcaaggttcagtggcagtggatcaggaacacaatattctctcaagatcaacagcctgcagcctgaagattttgggagttattactgtcaacatttttggagtactccgtacacgttcggaggggggaccaagcttgagatcaaatccggaggtggtggatccgaggtgcagctggtcgagtctggaggaggattggtgcagcctggagggtcattgaaactctcatgtgcagcctctggattcaccttcaataagtacgccatgaactgggtccgccaggctccaggaaagggtttggaatgggttgctcgcataagaagtaaatataataattatgcaacatattatgccgattcagtgaaagacaggttcaccatctccagagatgattcaaaaaacactgcctatctacaaatgaacaacttgaaaactgaggacactgccgtgtactactgtgtgagacatgggaacttcggtaatagctacatatcctactgggcttactggggccaagggactctggtcaccgtctcctcaggtggtggtggttctggcggcggcggctccggtggtggtggttctcagactgttgtgactcaggaaccttcactcaccgtatcacctggtggaacagtcacactcacttgtggctcctcgactggggctgttacatctggcaactacccaaactgggtccaacaaaaaccaggtcaggcaccccgtggtctaataggtgggactaagttcctcgcccccggtactcctgccagattctcaggctccctgcttggaggcaaggctgccctcaccctctcaggggtacagccagaggatgaggcagaatattactgtgttctatggtacagcaaccgctgggtgttcggtggaggaaccaaactgactgtccta

SEQ ID NO: 1960 - protein, 122 aa, Mus sp.
EVQLLESGGGLVQPGGSLNLSCAASGFDFSTYWMSWVRQAPGKGLEWIGEINPDSSTINYTPSLKDKFIISRDNAKNTLYLQMNKVRSDDTALYYCAGGYYRYPYYYTMDYWGQGTTVTVSS

SEQ ID NO: 1961 - protein, 5 aa, Mus sp.
TYWMS

SEQ ID NO: 1962 - protein, 17 aa, Mus sp.
EINPDSSTINYTPSLKD

SEQ ID NO: 1963 - protein, 13 aa, Mus sp.
GYYRYPYYYTMDY

SEQ ID NO: 1964 - DNA, 366 bp, Mus sp.
  source 1..366: mol_type = genomic DNA
gaggtgcagctgctcgagtctggaggtggcctggtgcagcctggaggatccctgaatctctcctgtgcagcctcaggattcgattttagtacatactggatgagttgggtccggcaggctccagggaaagggctagaatggattggagaaattaatccagatagcagtacgataaactatacgccatctctaaaggataaattcatcatctccagagacaacgccaaaaatacgctgtacctgcaaatgaacaaagtgagatctgacgacacagccctttattactgtgcaggaggatactataggtacccatattactatactatggactactggggccaagggaccacggtcaccgtctcctca

SEQ ID NO: 1965 - protein, 107 aa, Mus sp.; identical to SEQ ID NO: 1895

SEQ ID NO: 1966 - protein, 11 aa, Mus sp.
RASGNIHNYLA

SEQ ID NO: 1967 - protein, 7 aa, Mus sp.
NAKTLAD

SEQ ID NO: 1968 - protein, 9 aa, Mus sp.
QHFWSTPYT

SEQ ID NO: 1969 - DNA, 321 bp, Mus sp.
  source 1..321: mol_type = genomic DNA
gagctccagatgacccagtctccagcctccctatctgcatctgtgggagaaactgtcaccatcacatgtcgagcaagtgggaatattcacaattatttagcatggtatcagcagaaacagggaaaatctcctcagctcctggtctataatgcaaaaaccttagcagatggtgtgccatcaaggttcagtggcagtggatcaggaacacaatattctctcaagatcaacagcctgcagcctgaagattttgggagttattactgtcaacatttttggagtactccgtacacgttcggaggggggaccaagcttgagatcaaa

SEQ ID NO: 1970 - protein, 244 aa, Mus sp.
EVQLLESGGGLVQPGGSLNLSCAASGFDFSTYWMSWVRQAPGKGLEWIGEINPDSSTINYTPSLKDKFIISRDNAKNTLYLQMNKVRSDDTALYYCAGGYYRYPYYYTMDYWGQGTTVTVSSGGGGSGGGGSGGGGSELQMTQSPASLSASVGETVTITCRASGNIHNYLAWYQQKQGKSPQLLVYNAKTLADGVPSRFSGSGSGTQYSLKINSLQPEDFGSYYCQHFWSTPYTFGGGTKLEIK

SEQ ID NO: 1971 - DNA, 732 bp, Mus sp.
  source 1..732: mol_type = genomic DNA
gaggtgcagctgctcgagtctggaggtggcctggtgcagcctggaggatccctgaatctctcctgtgcagcctcaggattcgattttagtacatactggatgagttgggtccggcaggctccagggaaagggctagaatggattggagaaattaatccagatagcagtacgataaactatacgccatctctaaaggataaattcatcatctccagagacaacgccaaaaatacgctgtacctgcaaatgaacaaagtgagatctgacgacacagccctttattactgtgcaggaggatactataggtacccatattactatactatggactactggggccaagggaccacggtcaccgtctcctcaggtggtggtggttctggcggcggcggctccggtggtggtggttctgagctccagatgacccagtctccagcctccctatctgcatctgtgggagaaactgtcaccatcacatgtcgagcaagtgggaatattcacaattatttagcatggtatcagcagaaacagggaaaatctcctcagctcctggtctataatgcaaaaaccttagcagatggtgtgccatcaaggttcagtggcagtggatcaggaacacaatattctctcaagatcaacagcctgcagcctgaagattttgggagttattactgtcaacatttttggagtactccgtacacgttcggaggggggaccaagcttgagatcaaa

SEQ ID NO: 1972 - protein, 499 aa, Mus sp.
EVQLLESGGGLVQPGGSLNLSCAASGFDFSTYWMSWVRQAPGKGLEWIGEINPDSSTINYTPSLKDKFIISRDNAKNTLYLQMNKVRSDDTALYYCAGGYYRYPYYYTMDYWGQGTTVTVSSGGGGSGGGGSGGGGSELQMTQSPASLSASVGETVTITCRASGNIHNYLAWYQQKQGKSPQLLVYNAKTLADGVPSRFSGSGSGTQYSLKINSLQPEDFGSYYCQHFWSTPYTFGGGTKLEIKSGGGGSEVQLVESGGGLVQPGGSLKLSCAASGFTFNKYAMNWVRQAPGKGLEWVARIRSKYNNYATYYADSVKDRFTISRDDSKNTAYLQMNNLKTEDTAVYYCVRHGNFGNSYISYWAYWGQGTLVTVSSGGGGSGGGGSGGGGSQTVVTQEPSLTVSPGGTVTLTCGSSTGAVTSGNYPNWVQQKPGQAPRGLIGGTKFLAPGTPARFSGSLLGGKAALTLSGVQPEDEAEYYCVLWYSNRWVFGGGTKLTVL

SEQ ID NO: 1973 - DNA, 1497 bp, Mus sp.
  source 1..1497: mol_type = genomic DNA
gaggtgcagctgctcgagtctggaggtggcctggtgcagcctggaggatccctgaatctctcctgtgcagcctcaggattcgattttagtacatactggatgagttgggtccggcaggctccagggaaagggctagaatggattggagaaattaatccagatagcagtacgataaactatacgccatctctaaaggataaattcatcatctccagagacaacgccaaaaatacgctgtacctgcaaatgaacaaagtgagatctgacgacacagccctttattactgtgcaggaggatactataggtacccatattactatactatggactactggggccaagggaccacggtcaccgtctcctcaggtggtggtggttctggcggcggcggctccggtggtggtggttctgagctccagatgacccagtctccagcctccctatctgcatctgtgggagaaactgtcaccatcacatgtcgagcaagtgggaatattcacaattatttagcatggtatcagcagaaacagggaaaatctcctcagctcctggtctataatgcaaaaaccttagcagatggtgtgccatcaaggttcagtggcagtggatcaggaacacaatattctctcaagatcaacagcctgcagcctgaagattttgggagttattactgtcaacatttttggagtactccgtacacgttcggaggggggaccaagcttgagatcaaatccggaggtggtggatccgaggtgcagctggtcgagtctggaggaggattggtgcagcctggagggtcattgaaactctcatgtgcagcctctggattcaccttcaataagtacgccatgaactgggtccgccaggctccaggaaagggtttggaatgggttgctcgcataagaagtaaatataataattatgcaacatattatgccgattcagtgaaagacaggttcaccatctccagagatgattcaaaaaacactgcctatctacaaatgaacaacttgaaaactgaggacactgccgtgtactactgtgtgagacatgggaacttcggtaatagctacatatcctactgggcttactggggccaagggactctggtcaccgtctcctcaggtggtggtggttctggcggcggcggctccggtggtggtggttctcagactgttgtgactcaggaaccttcactcaccgtatcacctggtggaacagtcacactcacttgtggctcctcgactggggctgttacatctggcaactacccaaactgggtccaacaaaaaccaggtcaggcaccccgtggtctaataggtgggactaagttcctcgcccccggtactcctgccagattctcaggctccctgcttggaggcaaggctgccctcaccctctcaggggtacagccagaggatgaggcagaatattactgtgttctatggtacagcaaccgctgggtgttcggtggaggaaccaaactgactgtccta

SEQ ID NO: 1974 - protein, 122 aa, Mus sp.
EVQLLESGGGLVQPGGSLKLSCAASGFDFSTYWMSWVRQAPGKGLEWIGEINPDSSTVNYTPSLKDKFIISRDNAKNTLYLQMTKVRSEDTALYYCAGGYYRYPYYYTMDYWGQGTTVTVSS

SEQ ID NO: 1975 - protein, 5 aa, Mus sp.
TYWMS

SEQ ID NO: 1976 - protein, 17 aa, Mus sp.
EINPDSSTVNYTPSLKD

SEQ ID NO: 1977 - protein, 13 aa, Mus sp.
GYYRYPYYYTMDY

SEQ ID NO: 1978 - DNA, 366 bp, Mus sp.
  source 1..366: mol_type = genomic DNA
gaggtgcagctgctcgagtctggaggtggcctggtgcagcctggaggatccctgaaactctcctgtgcagcctcaggattcgattttagtacatactggatgagttgggtccggcaggctccagggaaagggctagaatggattggagaaattaatccagatagcagtacggtaaactatacgccatctctaaaggataaattcatcatctccagagacaacgccaaaaatacgctgtacctgcaaatgaccaaagtgagatctgaggacacagccctttattactgtgcaggaggatactataggtacccatattactatactatggactactggggccaagggaccacggtcaccgtctcctca

SEQ ID NO: 1979 - protein, 107 aa, Mus sp.; identical to SEQ ID NO: 1895

SEQ ID NO: 1980 - protein, 11 aa, Mus sp.
RASGNIHNYLA

SEQ ID NO: 1981 - protein, 7 aa, Mus sp.
NAKTLAD

SEQ ID NO: 1982 - protein, 9 aa, Mus sp.
QHFWSTPYT

SEQ ID NO: 1983 - DNA, 321 bp, Mus sp.; identical to SEQ ID NO: 1969
  source 1..321: mol_type = genomic DNA

SEQ ID NO: 1984 - protein, 244 aa, Mus sp.
EVQLLESGGGLVQPGGSLKLSCAASGFDFSTYWMSWVRQAPGKGLEWIGEINPDSSTVNYTPSLKDKFIISRDNAKNTLYLQMTKVRSEDTALYYCAGGYYRYPYYYTMDYWGQGTTVTVSSGGGGSGGGGSGGGGSELQMTQSPASLSASVGETVTITCRASGNIHNYLAWYQQKQGKSPQLLVYNAKTLADGVPSRFSGSGSGTQYSLKINSLQPEDFGSYYCQHFWSTPYTFGGGTKLEIK

SEQ ID NO: 1985 - DNA, 732 bp, Mus sp.
  source 1..732: mol_type = genomic DNA
gaggtgcagctgctcgagtctggaggtggcctggtgcagcctggaggatccctgaaactctcctgtgcagcctcaggattcgattttagtacatactggatgagttgggtccggcaggctccagggaaagggctagaatggattggagaaattaatccagatagcagtacggtaaactatacgccatctctaaaggataaattcatcatctccagagacaacgccaaaaatacgctgtacctgcaaatgaccaaagtgagatctgaggacacagccctttattactgtgcaggaggatactataggtacccatattactatactatggactactggggccaagggaccacggtcaccgtctcctcaggtggtggtggttctggcggcggcggctccggtggtggtggttctgagctccagatgacccagtctccagcctccctatctgcatctgtgggagaaactgtcaccatcacatgtcgagcaagtgggaatattcacaattatttagcatggtatcagcagaaacagggaaaatctcctcagctcctggtctataatgcaaaaaccttagcagatggtgtgccatcaaggttcagtggcagtggatcaggaacacaatattctctcaagatcaacagcctgcagcctgaagattttgggagttattactgtcaacatttttggagtactccgtacacgttcggaggggggaccaagcttgagatcaaa

SEQ ID NO: 1986 - protein, 499 aa, Mus sp.
EVQLLESGGGLVQPGGSLKLSCAASGFDFSTYWMSWVRQAPGKGLEWIGEINPDSSTVNYTPSLKDKFIISRDNAKNTLYLQMTKVRSEDTALYYCAGGYYRYPYYYTMDYWGQGTTVTVSSGGGGSGGGGSGGGGSELQMTQSPASLSASVGETVTITCRASGNIHNYLAWYQQKQGKSPQLLVYNAKTLADGVPSRFSGSGSGTQYSLKINSLQPEDFGSYYCQHFWSTPYTFGGGTKLEIKSGGGGSEVQLVESGGGLVQPGGSLKLSCAASGFTFNKYAMNWVRQAPGKGLEWVARIRSKYNNYATYYADSVKDRFTISRDDSKNTAYLQMNNLKTEDTAVYYCVRHGNFGNSYISYWAYWGQGTLVTVSSGGGGSGGGGSGGGGSQTVVTQEPSLTVSPGGTVTLTCGSSTGAVTSGNYPNWVQQKPGQAPRGLIGGTKFLAPGTPARFSGSLLGGKAALTLSGVQPEDEAEYYCVLWYSNRWVFGGGTKLTVL

SEQ ID NO: 1987 - DNA, 1497 bp, Mus sp.
  source 1..1497: mol_type = genomic DNA
gaggtgcagctgctcgagtctggaggtggcctggtgcagcctggaggatccctgaaactctcctgtgcagcctcaggattcgattttagtacatactggatgagttgggtccggcaggctccagggaaagggctagaatggattggagaaattaatccagatagcagtacggtaaactatacgccatctctaaaggataaattcatcatctccagagacaacgccaaaaatacgctgtacctgcaaatgaccaaagtgagatctgaggacacagccctttattactgtgcaggaggatactataggtacccatattactatactatggactactggggccaagggaccacggtcaccgtctcctcaggtggtggtggttctggcggcggcggctccggtggtggtggttctgagctccagatgacccagtctccagcctccctatctgcatctgtgggagaaactgtcaccatcacatgtcgagcaagtgggaatattcacaattatttagcatggtatcagcagaaacagggaaaatctcctcagctcctggtctataatgcaaaaaccttagcagatggtgtgccatcaaggttcagtggcagtggatcaggaacacaatattctctcaagatcaacagcctgcagcctgaagattttgggagttattactgtcaacatttttggagtactccgtacacgttcggaggggggaccaagcttgagatcaaatccggaggtggtggatccgaggtgcagctggtcgagtctggaggaggattggtgcagcctggagggtcattgaaactctcatgtgcagcctctggattcaccttcaataagtacgccatgaactgggtccgccaggctccaggaaagggtttggaatgggttgctcgcataagaagtaaatataataattatgcaacatattatgccgattcagtgaaagacaggttcaccatctccagagatgattcaaaaaacactgcctatctacaaatgaacaacttgaaaactgaggacactgccgtgtactactgtgtgagacatgggaacttcggtaatagctacatatcctactgggcttactggggccaagggactctggtcaccgtctcctcaggtggtggtggttctggcggcggcggctccggtggtggtggttctcagactgttgtgactcaggaaccttcactcaccgtatcacctggtggaacagtcacactcacttgtggctcctcgactggggctgttacatctggcaactacccaaactgggtccaacaaaaaccaggtcaggcaccccgtggtctaataggtgggactaagttcctcgcccccggtactcctgccagattctcaggctccctgcttggaggcaaggctgccctcaccctctcaggggtacagccagaggatgaggcagaatattactgtgttctatggtacagcaaccgctgggtgttcggtggaggaaccaaactgactgtccta

SEQ ID NO: 1988 - DNA, 4104 bp, synthetic construct
  misc_feature 1..4104: note = human IGF-R1 construct
  source 1..4104: mol_type = other DNA
atgaagtctggctccggcggagggtccccgacctcgctgtgggggctcctgtttctctccgccgcgctctcgctctggccgacgagtggagaaatctgcgggccaggcatcgacatccgcaacgactatcagcagctgaagcgcctggagaactgcacggtgatcgagggctacctccacatcctgctcatctccaaggccgaggactaccgcagctaccgcttccccaagctcacggtcattaccgagtacttgctgctgttccgagtggctggcctcgagagcctcggagacctcttccccaacctcacggtcatccgcggctggaaactcttctacaactacgccctggtcatcttcgagatgaccaatctcaaggatattgggctttacaacctgaggaacattactcggggggccatcaggattgagaaaaatgctgacctctgttacctctccactgtggactggtccctgatcctggatgcggtgtccaataactacattgtggggaataagcccccaaaggaatgtggggacctgtgtccagggaccatggaggagaagccgatgtgtgagaagaccaccatcaacaatgagtacaactaccgctgctggaccacaaaccgctgccagaaaatgtgcccaagcacgtgtgggaagcgggcgtgcaccgagaacaatgagtgctgccaccccgagtgcctgggcagctgcagcgcgcctgacaacgacacggcctgtgtagcttgccgccactactactatgccggtgtctgtgtgcctgcctgcccgcccaacacctacaggtttgagggctggcgctgtgtggaccgtgacttctgcgccaacatcctcagcgccgagagcagcgactccgaggggtttgtgatccacgacggcgagtgcatgcaggagtgcccctcgggcttcatccgcaacggcagccagagcatgtactgcatcccttgtgaaggtccttgcccgaaggtctgtgaggaagaaaagaaaacaaagaccattgattctgttacttctgctcagatgctccaaggatgcaccatcttcaagggcaatttgctcattaacatccgacgggggaataacattgcttcagagctggagaacttcatggggctcatcgaggtggtgacgggctacgtgaagatccgccattctcatgccttggtctccttgtccttcctaaaaaaccttcgcctcatcctaggagaggagcagctagaagggaattactccttctacgtcctcgacaaccagaacttgcagcaactgtgggactgggaccaccgcaacctgaccatcaaagcagggaaaatgtactttgctttcaatcccaaattatgtgtttccgaaatttaccgcatggaggaagtgacggggactaaagggcgccaaagcaaaggggacataaacaccaggaacaacggggagagagcctcctgtgaaagtgacgtcctgcatttcacctccaccaccacgtcgaagaatcgcatcatcataacctggcaccggtaccggccccctgactacagggatctcatcagcttcaccgtttactacaaggaagcaccctttaagaatgtcacagagtatgatgggcaggatgcctgcggctccaacagctggaacatggtggacgtggacctcccgcccaacaaggacgtggagcccggcatcttactacatgggctgaagccctggactcagtacgccgtttacgtcaaggctgtgaccctcaccatggtggagaacgaccatatccgtggggccaagagtgagatcttgtacattcgcaccaatgcttcagttccttccattcccttggacgttctttcagcatcgaactcctcttctcagttaatcgtgaagtggaaccctccctctctgcccaacggcaacctgagttactacattgtgcgctggcagcggcagcctcaggacggctacctttaccggcacaattactgctccaaagacaaaatccccatcaggaagtatgccgacggcaccatcgacattgaggaggtcacagagaaccccaagactgaggtgtgtggtggggagaaagggccttgctgcgcctgccccaaaactgaagccgagaagcaggccgagaaggaggaggctgaataccgcaaagtctttgagaatttcctgcacaactccatcttcgtgcccagacctgaaaggaagcggagagatgtcatgcaagtggccaacaccaccatgtccagccgaagcaggaacaccacggccgcagacacctacaacatcaccgacccggaagagctggagacagagtaccctttctttgagagcagagtggataacaaggagagaactgtcatttctaaccttcggcctttcacattgtaccgcatcgatatccacagctgcaaccacgaggctgagaagctgggctgcagcgcctccaacttcgtctttgcaaggactatgcccgcagaaggagcagatgacattcctgggccagtgacctgggagccaaggcctgaaaactccatctttttaaagtggccggaacctgagaatcccaatggattgattctaatgtatgaaataaaatacggatcacaagttgaggatcagcgagaatgtgtgtccagacaggaatacaggaagtatggaggggccaagctaaaccggctaaacccggggaactacacagcccggattcaggccacatctctctctgggaatgggtcgtggacagatcctgtgttcttctatgtccaggccaaaacaggatatgaaaacttcatccatctgatcatcgctctgcccgtcgctgtcctgttgatcgtgggagggttggtgattatgctgtacgtcttccatagaaagagaaataacagcaggctggggaatggagtgctgtatgcctctgtgaacccggagtacttcagcgctgctgatgtgtacgttcctgatgagtgggaggtggctcgggagaagatcaccatgagccgggaacttgggcaggggtcgtttgggatggtctatgaaggagttgccaagggtgtggtgaaagatgaacctgaaaccagagtggccattaaaacagtgaacgaggccgcaagcatgcgtgagaggattgagtttctcaacgaagcttctgtgatgaaggagttcaattgtcaccatgtggtgcgattgctgggtgtggtgtcccaaggccagccaacactggtcatcatggaactgatgacacggggcgatctcaaaagttatctccggtctctgaggccagaaatggagaataatccagtcctagcacctccaagcctgagcaagatgattcagatggccggagagattgcagacggcatggcatacctcaacgccaataagttcgtccacagagaccttgctgcccggaattgcatggtagccgaagatttcacagtcaaaatcggagattttggtatgacgcgagatatctatgagacagactattaccggaaaggagggaaagggctgctgcccgtgcgctggatgtctcctgagtccctcaaggatggagtcttcaccacttactcggacgtctggtccttcggggtcgtcctctgggagatcgccacactggccgagcagccctaccagggcttgtccaacgagcaagtccttcgcttcgtcatggagggcggccttctggacaagccagacaactgtcctgacatgctgtttgaactgatgcgcatgtgctggcagtataaccccaagatgaggccttccttcctggagatcatcagcagcatcaaagaggagatggagcctggcttccgggaggtctccttctactacagcgaggagaacaagctgcccgagccggaggagctggacctggagccagagaacatggagagcgtccccctggacccctcggcctcctcgtcctccctgccactgcccgacagacactcaggacacaaggccgagaacggccccggccctggggtgctggtcctccgcgccagcttcgacgagagacagccttacgcccacatgaacgggggccgcaagaacgagcgggccttgccgctgccccagtcttcgacctgctga

SEQ ID NO: 1989 - protein, 1367 aa, synthetic construct
  REGION 1..1367: note = human IGF-R1 construct
MKSGSGGGSPTSLWGLLFLSAALSLWPTSGEICGPGIDIRNDYQQLKRLENCTVIEGYLHILLISKAEDYRSYRFPKLTVITEYLLLFRVAGLESLGDLFPNLTVIRGWKLFYNYALVIFEMTNLKDIGLYNLRNITRGAIRIEKNADLCYLSTVDWSLILDAVSNNYIVGNKPPKECGDLCPGTMEEKPMCEKTTINNEYNYRCWTTNRCQKMCPSTCGKRACTENNECCHPECLGSCSAPDNDTACVACRHYYYAGVCVPACPPNTYRFEGWRCVDRDFCANILSAESSDSEGFVIHDGECMQECPSGFIRNGSQSMYCIPCEGPCPKVCEEEKKTKTIDSVTSAQMLQGCTIFKGNLLINIRRGNNIASELENFMGLIEVVTGYVKIRHSHALVSLSFLKNLRLILGEEQLEGNYSFYVLDNQNLQQLWDWDHRNLTIKAGKMYFAFNPKLCVSEIYRMEEVTGTKGRQSKGDINTRNNGERASCESDVLHFTSTTTSKNRIIITWHRYRPPDYRDLISFTVYYKEAPFKNVTEYDGQDACGSNSWNMVDVDLPPNKDVEPGILLHGLKPWTQYAVYVKAVTLTMVENDHIRGAKSEILYIRTNASVPSIPLDVLSASNSSSQLIVKWNPPSLPNGNLSYYIVRWQRQPQDGYLYRHNYCSKDKIPIRKYADGTIDIEEVTENPKTEVCGGEKGPCCACPKTEAEKQAEKEEAEYRKVFENFLHNSIFVPRPERKRRDVMQVANTTMSSRSRNTTAADTYNITDPEELETEYPFFESRVDNKERTVISNLRPFTLYRIDIHSCNHEAEKLGCSASNFVFARTMPAEGADDIPGPVTWEPRPENSIFLKWPEPENPNGLILMYEIKYGSQVEDQRECVSRQEYRKYGGAKLNRLNPGNYTARIQATSLSGNGSWTDPVFFYVQAKTGYENFIHLIIALPVAVLLIVGGLVIMLYVFHRKRNNSRLGNGVLYASVNPEYFSAADVYVPDEWEVAREKITMSRELGQGSFGMVYEGVAKGVVKDEPETRVAIKTVNEAASMRERIEFLNEASVMKEFNCHHVVRLLGVVSQGQPTLVIMELMTRGDLKSYLRSLRPEMENNPVLAPPSLSKMIQMAGEIADGMAYLNANKFVHRDLAARNCMVAEDFTVKIGDFGMTRDIYETDYYRKGGKGLLPVRWMSPESLKDGVFTTYSDVWSFGVVLWEIATLAEQPYQGLSNEQVLRFVMEGGLLDKPDNCPDMLFELMRMCWQYNPKMRPSFLEIISSIKEEMEPGFREVSFYYSEENKLPEPEELDLEPENMESVPLDPSASSSSLPLPDRHSGHKAENGPGPGVLVLRASFDERQPYAHMNGGRKNERALPLPQSSTC

SEQ ID NO: 1990 - DNA, 3531 bp, synthetic construct
  misc_feature 1..3531: note = soluble fusion protein of h IGF-R1 and m IgG1 Fc
  source 1..3531: mol_type = other DNA
atgaagtctggctccggcggagggtccccgacctcgctgtgggggctcctgtttctctccgccgcgctctcgctctggccgacgagtggagaaatctgcgggccaggcatcgacatccgcaacgactatcagcagctgaagcgcctggagaactgcacggtgatcgagggctacctccacatcctgctcatctccaaggccgaggactaccgcagctaccgcttccccaagctcacggtcattaccgagtacttgctgctgttccgagtggctggcctcgagagcctcggagacctcttccccaacctcacggtcatccgcggctggaaactcttctacaactacgccctggtcatcttcgagatgaccaatctcaaggatattgggctttacaacctgaggaacattactcggggggccatcaggattgagaaaaatgctgacctctgttacctctccactgtggactggtccctgatcctggatgcggtgtccaataactacattgtggggaataagcccccaaaggaatgtggggacctgtgtccagggaccatggaggagaagccgatgtgtgagaagaccaccatcaacaatgagtacaactaccgctgctggaccacaaaccgctgccagaaaatgtgcccaagcacgtgtgggaagcgggcgtgcaccgagaacaatgagtgctgccaccccgagtgcctgggcagctgcagcgcgcctgacaacgacacggcctgtgtagcttgccgccactactactatgccggtgtctgtgtgcctgcctgcccgcccaacacctacaggtttgagggctggcgctgtgtggaccgtgacttctgcgccaacatcctcagcgccgagagcagcgactccgaggggtttgtgatccacgacggcgagtgcatgcaggagtgcccctcgggcttcatccgcaacggcagccagagcatgtactgcatcccttgtgaaggtccttgcccgaaggtctgtgaggaagaaaagaaaacaaagaccattgattctgttacttctgctcagatgctccaaggatgcaccatcttcaagggcaatttgctcattaacatccgacgggggaataacattgcttcagagctggagaacttcatggggctcatcgaggtggtgacgggctacgtgaagatccgccattctcatgccttggtctccttgtccttcctaaaaaaccttcgcctcatcctaggagaggagcagctagaagggaattactccttctacgtcctcgacaaccagaacttgcagcaactgtgggactgggaccaccgcaacctgaccatcaaagcagggaaaatgtactttgctttcaatcccaaattatgtgtttccgaaatttaccgcatggaggaagtgacggggactaaagggcgccaaagcaaaggggacataaacaccaggaacaacggggagagagcctcctgtgaaagtgacgtcctgcatttcacctccaccaccacgtcgaagaatcgcatcatcataacctggcaccggtaccggccccctgactacagggatctcatcagcttcaccgtttactacaaggaagcaccctttaagaatgtcacagagtatgatgggcaggatgcctgcggctccaacagctggaacatggtggacgtggacctcccgcccaacaaggacgtggagcccggcatcttactacatgggctgaagccctggactcagtacgccgtttacgtcaaggctgtgaccctcaccatggtggagaacgaccatatccgtggggccaagagtgagatcttgtacattcgcaccaatgcttcagttccttccattcccttggacgttctttcagcatcgaactcctcttctcagttaatcgtgaagtggaaccctccctctctgcccaacggcaacctgagttactacattgtgcgctggcagcggcagcctcaggacggctacctttaccggcacaattactgctccaaagacaaaatccccatcaggaagtatgccgacggcaccatcgacattgaggaggtcacagagaaccccaagactgaggtgtgtggtggggagaaagggccttgctgcgcctgccccaaaactgaagccgagaagcaggccgagaaggaggaggctgaataccgcaaagtctttgagaatttcctgcacaactccatcttcgtgcccagacctgaaaggaagcggagagatgtcatgcaagtggccaacaccaccatgtccagccgaagcaggaacaccacggccgcagacacctacaacatcaccgacccggaagagctggagacagagtaccctttctttgagagcagagtggataacaaggagagaactgtcatttctaaccttcggcctttcacattgtaccgcatcgatatccacagctgcaaccacgaggctgagaagctgggctgcagcgcctccaacttcgtctttgcaaggactatgcccgcagaaggagcagatgacattcctgggccagtgacctgggagccaaggcctgaaaactccatctttttaaagtggccggaacctgagaatcccaatggattgattctaatgtatgaaataaaatacggatcacaagttgaggatcagcgagaatgtgtgtccagacaggaatacaggaagtatggaggggccaagctaaaccggctaaacccggggaactacacagcccggattcaggccacatctctctctgggaatgggtcgtggacagatcctgtgttcttctatgtccaggccaaaacaggatatgaaaacttcatccattccggaggtggtggatccgtgcccagggattgtggttgtaagccttgcatatgtacagtcccagaagtatcatctgtcttcatcttccccccaaagcccaaggatgtgctcaccattactctgactcctaaggtcacgtgtgttgtggtagacatcagcaaggatgatcccgaggtccagttcagctggtttgtagatgatgtggaggtgcacacagctcagacgaaaccccgggaggagcagatcaacagcactttccgttcagtcagtgaacttcccatcatgcaccaggactggctcaatggcaaggagttcaaatgcagggtcaacagtgcagctttccctgcccccatcgagaaaaccatctccaaaaccaaaggcagaccgaaggctccacaggtgtacaccattccacctcccaaggagcagatggccaaggataaagtcagtctgacctgcatgataacaaacttcttccctgaagacattactgtggagtggcagtggaatgggcagccagcggagaactacaagaacactcagcccatcatggacacagatggctcttacttcgtctacagcaagctcaatgtgcagaagagcaactgggaggcaggaaatactttcacctgctctgtgttacatgagggcctgcacaaccaccatactgagaagagcctctcccactctcctggtaaatccgggcatcatcaccatcatcattga

SEQ ID NO: 1991 - protein, 1176 aa, synthetic construct
  REGION 1..1176: note = soluble fusion protein of h IGF-R1 and m IgG1 Fc
MKSGSGGGSPTSLWGLLFLSAALSLWPTSGEICGPGIDIRNDYQQLKRLENCTVIEGYLHILLISKAEDYRSYRFPKLTVITEYLLLFRVAGLESLGDLFPNLTVIRGWKLFYNYALVIFEMTNLKDIGLYNLRNITRGAIRIEKNADLCYLSTVDWSLILDAVSNNYIVGNKPPKECGDLCPGTMEEKPMCEKTTINNEYNYRCWTTNRCQKMCPSTCGKRACTENNECCHPECLGSCSAPDNDTACVACRHYYYAGVCVPACPPNTYRFEGWRCVDRDFCANILSAESSDSEGFVIHDGECMQECPSGFIRNGSQSMYCIPCEGPCPKVCEEEKKTKTIDSVTSAQMLQGCTIFKGNLLINIRRGNNIASELENFMGLIEVVTGYVKIRHSHALVSLSFLKNLRLILGEEQLEGNYSFYVLDNQNLQQLWDWDHRNLTIKAGKMYFAFNPKLCVSEIYRMEEVTGTKGRQSKGDINTRNNGERASCESDVLHFTSTTTSKNRIIITWHRYRPPDYRDLISFTVYYKEAPFKNVTEYDGQDACGSNSWNMVDVDLPPNKDVEPGILLHGLKPWTQYAVYVKAVTLTMVENDHIRGAKSEILYIRTNASVPSIPLDVLSASNSSSQLIVKWNPPSLPNGNLSYYIVRWQRQPQDGYLYRHNYCSKDKIPIRKYADGTIDIEEVTENPKTEVCGGEKGPCCACPKTEAEKQAEKEEAEYRKVFENFLHNSIFVPRPERKRRDVMQVANTTMSSRSRNTTAADTYNITDPEELETEYPFFESRVDNKERTVISNLRPFTLYRIDIHSCNHEAEKLGCSASNFVFARTMPAEGADDIPGPVTWEPRPENSIFLKWPEPENPNGLILMYEIKYGSQVEDQRECVSRQEYRKYGGAKLNRLNPGNYTARIQATSLSGNGSWTDPVFFYVQAKTGYENFIHSGGGGSVPRDCGCKPCICTVPEVSSVFIFPPKPKDVLTITLTPKVTCVVVDISKDDPEVQFSWFVDDVEVHTAQTKPREEQINSTFRSVSELPIMHQDWLNGKEFKCRVNSAAFPAPIEKTISKTKGRPKAPQVYTIPPPKEQMAKDKVSLTCMITNFFPEDITVEWQWNGQPAENYKNTQPIMDTDGSYFVYSKLNVQKSNWEAGNTFTCSVLHEGLHNHHTEKSLSHSPGKSGHHHHHH

SEQ ID NO: 1992 - DNA, 4101 bp, synthetic construct
  misc_feature 1..4101: note = murine IGF-R1 construct
  source 1..4101: mol_type = other DNA
atgggatggagctgtatcatcctcttcttggtagcaacagctacaggtgtacactccgattacaaggacgacgatgacaaggaaatctgtgggcccggcattgacatccgcaacgactatcagcagctgaagcgcctggaaaactgcacggtgatcgagggcttcctccacatcctgctcatctccaaggccgaggactaccgaagctaccgcttccccaagctcaccgtcatcactgagtacttgctgctcttccgagtcgctggcctcgagagcctgggagacctcttccccaacctcacagtcatccgtggctggaaactcttctacaactacgcactggtcatcttcgagatgaccaatctcaaggatattgggctttataatctgaggaacattactcggggggccatcaggattgagaagaacgccgacctctgttacctctccaccatagactggtctctcatcttggatgcggtgtccaataactacattgtggggaacaagcccccgaaggaatgtggggacctgtgtccagggacattggaggagaagcccatgtgtgagaagaccaccatcaacaatgagtacaactaccgctgctggaccacaaatcgctgccagaaaatgtgcccaagtgtgtgcgggaagcgagcctgcaccgagaacaacgagtgctgccacccggagtgcctgggcagctgccacacaccggacgacaacacaacctgcgtggcctgcagacactactactacaaaggcgtgtgtgtgcctgcctgcccgcctggcacctacaggttcgagggctggcgctgtgtggatcgcgatttctgcgccaacatccccaacgctgagagcagtgactcggatggcttcgttatccacgacgatgagtgcatgcaggagtgtccctcaggcttcatccgcaacagcacccagagcatgtactgtatcccctgcgaaggcccctgccccaaagtctgcggcgatgaagagaagaaaacgaaaaccatcgattcggtgacttctgctcaaatgctccaaggatgcaccatcctgaagggcaatctgcttattaacatccggagaggcaataacattgcctcggagttggagaacttcatggggctcatcgaggtggtgaccggctacgtgaagatccgccattctcatgccttggtctccttgtccttcctgaagaaccttcgtctcatcttaggagaggagcagctggaagggaactactccttctatgtcctagacaaccagaacttgcagcagctgtgggactggaaccaccggaacctgaccgtcaggtccggaaagatgtactttgctttcaatcccaagctgtgtgtctccgaaatttaccgcatggaggaagtgaccggaaccaagggacgccagagcaaaggggacataaacaccaggaacaacggagagcgagcttcctgtgaaagtgatgttctccgtttcacctccaccacgacctggaagaaccgaatcatcataacgtggcaccggtaccggccgccggactaccgggatctcatcagcttcacagtttactacaaggaggcaccatttaaaaacgttacggaatatgacgggcaggatgcctgtggctccaacagctggaacatggtggatgtagacctgcctccgaacaaggagggcgagcctggcattttactgcatgggctgaagccctggacccagtatgctgtctatgtcaaggctgtgaccctcaccatggtggaaaacgaccatatccgtggggccaaaagtgaaatcttgtacattcgcaccaatgcttcagtcccttccattcccctagatgtcctctcagcatcaaactcttcctctcagctgattgtgaagtggaatcctccaactctgcccaatggtaacttgagttactacattgtgaggtggcagcggcagccccaggatggttacctgtaccggcacaactactgctccaaagacaaaatacccatcagaaagtacgccgatggtaccatcgacgtggaggaggtgacggaaaatcccaagacagaagtgtgtggtggtgataaagggccatgctgcgcttgccctaaaactgaagctgagaagcaggctgagaaggaggaggctgagtaccgtaaagtctttgagaatttccttcacaattccatctttgtgcccaggcccgaaaggaggcggagagacgtcatgcaagtggccaacacgaccatgtccagccgaagcaggaacaccacggtagctgacacctacaatatcacagacccggaggagttcgagacagagtaccctttctttgagagcagagtggataacaaggagaggactgtcatctccaacctccggcctttcactctgtaccgcatcgatatccacagctgcaaccacgaggctgagaagctgggctgcagcgcctccaacttcgtctttgcgagaaccatgccagcagaaggagcagatgatatccctggtccggtgacctgggagccaagacccgaaaactccatctttttaaagtggccagaacccgagaaccccaacggattgatcctaatgtatgaaattaaatacgggtcgcaagtcgaggatcagcgggaatgtgtgtccagacaggagtacaggaagtacggaggggccaaactcaaccgtctaaacccagggaactatacagcccggattcaggctacctccctctctgggaatgggtcatggacagatcctgtgttcttctatgtccccgccaaaacgacgtatgagaacttcatgcatctgatcattgctctgccggttgccatcctgctgatcgttggggggctggttatcatgctgtatgtcttccatagaaagagaaataacagcaggttgggcaatggagtgctgtatgcttctgtgaaccccgagtatttcagcgcagctgatgtgtacgtgcctgatgaatgggaggtagctcgagagaagatcaccatgaaccgggagctcggacaagggtcctttgggatggtctatgaaggagtggccaagggtgtggtcaaggatgaacccgaaaccagagtggccatcaagacggtaaacgaggctgcaagtatgcgtgaaagaatcgagtttctcaacgaggcctcggtgatgaaggagttcaattgtcaccatgtggtccggttgctgggtgtggtatcccaaggccagcccaccctggtcatcatggaactaatgacacgcggtgatctcaaaagttatctccggtctctgaggccagaagtggagcagaataatctagtcctcattcctccgagcttaagcaagatgatccagatggctggagagattgcagatggcatggcctacctcaatgccaacaagttcgtccacagagaccttgctgctaggaactgcatggtagccgaagatttcacagtcaaaattggagatttcggtatgacacgagacatctacgagacggactactaccggaaaggcgggaaggggttgctgcctgtgcgctggatgtctcccgagtccctcaaggatggtgtcttcactactcattctgatgtctggtccttcggggtcgtcctctgggagatcgccacgctggctgagcagccctaccagggcttgtccaacgagcaagttcttcgtttcgtcatggagggtggccttctggacaagccggacaactgccctgatatgctgtttgaacttatgcgcatgtgctggcagtataaccccaagatgcggccctccttcctggagatcatcggcagcatcaaggatgagatggagcccagcttccaggaggtctccttctactacagcgaggagaacaagcctcccgagccagaggagctggagatggagcctgagaacatggagagcgtcccactggacccttcggcctcctcagcctccctgcctctgcctgaaagacactcaggacacaaggctgagaatggcccgggccctggcgtgctcgttctccgcgccagttttgatgagagacagccttacgctcacatgaacgggggacgcgccaacgagagggccttgcctctgccccagtcctcgacctgctga

SEQ ID NO: 1993 - protein, 1366 aa, synthetic construct
  REGION 1..1366: note = murine IGF-R1 construct
MGWSCIILFLVATATGVHSDYKDDDDKEICGPGIDIRNDYQQLKRLENCTVIEGFLHILLISKAEDYRSYRFPKLTVITEYLLLFRVAGLESLGDLFPNLTVIRGWKLFYNYALVIFEMTNLKDIGLYNLRNITRGAIRIEKNADLCYLSTIDWSLILDAVSNNYIVGNKPPKECGDLCPGTLEEKPMCEKTTINNEYNYRCWTTNRCQKMCPSVCGKRACTENNECCHPECLGSCHTPDDNTTCVACRHYYYKGVCVPACPPGTYRFEGWRCVDRDFCANIPNAESSDSDGFVIHDDECMQECPSGFIRNSTQSMYCIPCEGPCPKVCGDEEKKTKTIDSVTSAQMLQGCTILKGNLLINIRRGNNIASELENFMGLIEVVTGYVKIRHSHALVSLSFLKNLRLILGEEQLEGNYSFYVLDNQNLQQLWDWNHRNLTVRSGKMYFAFNPKLCVSEIYRMEEVTGTKGRQSKGDINTRNNGERASCESDVLRFTSTTTWKNRIIITWHRYRPPDYRDLISFTVYYKEAPFKNVTEYDGQDACGSNSWNMVDVDLPPNKEGEPGILLHGLKPWTQYAVYVKAVTLTMVENDHIRGAKSEILYIRTNASVPSIPLDVLSASNSSSQLIVKWNPPTLPNGNLSYYIVRWQRQPQDGYLYRHNYCSKDKIPIRKYADGTIDVEEVTENPKTEVCGGDKGPCCACPKTEAEKQAEKEEAEYRKVFENFLHNSIFVPRPERRRRDVMQVANTTMSSRSRNTTVADTYNITDPEEFETEYPFFESRVDNKERTVISNLRPFTLYRIDIHSCNHEAEKLGCSASNFVFARTMPAEGADDIPGPVTWEPRPENSIFLKWPEPENPNGLILMYEIKYGSQVEDQRECVSRQEYRKYGGAKLNRLNPGNYTARIQATSLSGNGSWTDPVFFYVPAKTTYENFMHLIIALPVAILLIVGGLVIMLYVFHRKRNNSRLGNGVLYASVNPEYFSAADVYVPDEWEVAREKITMNRELGQGSFGMVYEGVAKGVVKDEPETRVAIKTVNEAASMRERIEFLNEASVMKEFNCHHVVRLLGVVSQGQPTLVIMELMTRGDLKSYLRSLRPEVEQNNLVLIPPSLSKMIQMAGEIADGMAYLNANKFVHRDLAARNCMVAEDFTVKIGDFGMTRDIYETDYYRKGGKGLLPVRWMSPESLKDGVFTTHSDVWSFGVVLWEIATLAEQPYQGLSNEQVLRFVMEGGLLDKPDNCPDMLFELMRMCWQYNPKMRPSFLEIIGSIKDEMEPSFQEVSFYYSEENKPPEPEELEMEPENMESVPLDPSASSASLPLPERHSGHKAENGPGPGVLVLRASFDERQPYAHMNGGRANERALPLPQSSTC

SEQ ID NO: 1994 - DNA, 4095 bp, synthetic construct
  misc_feature 1..4095: note = mutated human IGF-R1 antigen
  source 1..4095: mol_type = other DNA
atgggatggagctgtatcatcctcttcttggtagcaacagctacaggtgtacactccgattacaaggacgacgatgacaaggaaatctgtgggcccggcattgacatccgcaacgactatcagcagctgaagcgcctggaaaactgcacggtgatcgagggcttcctccacatcctgctcatctccaaggccgaggactaccgaagctaccgcttccccaagctcaccgtcatcactgagtacttgctgctcttccgagtcgctggcctcgagagcctgggagacctcttccccaacctcacagtcatccgtggctggaaactcttctacaactacgcactggtcatcttcgagatgaccaatctcaaggatattgggctttataatctgaggaacattactcggggggccatcaggattgagaagaacgccgacctctgttacctctccaccatagactggtctctcatcttggatgcggtgtccaataactacattgtggggaacaagcccccgaaggaatgtggggacctgtgtccagggacattggaggagaagcccatgtgtgagaagaccaccatcaacaatgagtacaactaccgctgctggaccacaaatcgctgccagaaaatgtgcccaagtgtgtgcgggaagcgagcctgcaccgagaacaacgagtgctgccacccggagtgcctgggcagctgccacacaccggacgacaacacaacctgcgtggcctgcagacactactactacaaaggcgtgtgtgtgcctgcctgcccgcctggcacctacaggttcgagggctggcgctgtgtggatcgcgatttctgcgccaacatccccaacgctgagagcagtgactcggatggcttcgttatccacgacgatgagtgcatgcaggagtgtccctcaggcttcatccgcaacagcacccagagcatgtactgtatcccctgcgaaggcccctgccccaaggtctgtgaggaagaaaagaaaacaaagaccattgattctgttacttctgctcagatgctccaaggatgcaccatcttcaagggcaatttgctcattaacatccgacgggggaataacattgcttcagagctggagaacttcatggggctcatcgaggtggtgacgggctacgtgaagatccgccattctcatgccttggtctccttgtccttcctaaaaaaccttcgcctcatcctaggagaggagcagctagaagggaattactccttctacgtcctcgacaaccagaacttgcagcaactgtgggactgggaccaccgcaacctgaccatcaaagcagggaaaatgtactttgctttcaatcccaaattatgtgtttccgaaatttaccgcatggaggaagtgacggggactaaagggcgccaaagcaaaggggacataaacaccaggaacaacggggagagagcctcctgtgaaagtgacgtcctgcatttcacctccaccaccacgtcgaagaatcgcatcatcataacctggcaccggtaccggccccctgactacagggatctcatcagcttcaccgtttactacaaggaagcaccctttaagaatgtcacagagtatgatgggcaggatgcctgcggctccaacagctggaacatggtggacgtggacctcccgcccaacaaggacgtggagcccggcatcttactacatgggctgaagccctggactcagtacgccgtttacgtcaaggctgtgaccctcaccatggtggagaacgaccatatccgtggggccaagagtgagatcttgtacattcgcaccaatgcttcagttccttccattcccttggacgttctttcagcatcgaactcctcttctcagttaatcgtgaagtggaaccctccctctctgcccaacggcaacctgagttactacattgtgcgctggcagcggcagcctcaggacggctacctttaccggcacaattactgctccaaagacaaaatccccatcaggaagtatgccgacggcaccatcgacattgaggaggtcacagagaaccccaagactgaggtgtgtggtggggagaaagggccttgctgcgcctgccccaaaactgaagccgagaagcaggccgagaaggaggaggctgaataccgcaaagtctttgagaatttcctgcacaactccatcttcgtgcccagacctgaaaggaagcggagagatgtcatgcaagtggccaacaccaccatgtccagccgaagcaggaacaccacggccgcagacacctacaacatcaccgacccggaagagctggagacagagtaccctttctttgagagcagagtggataacaaggagagaactgtcatttctaaccttcggcctttcacattgtaccgcatcgatatccacagctgcaaccacgaggctgagaagctgggctgcagcgcctccaacttcgtctttgcaaggactatgcccgcagaaggagcagatgacattcctgggccagtgacctgggagccaaggcctgaaaactccatctttttaaagtggccggaacctgagaatcccaatggattgattctaatgtatgaaataaaatacggatcacaagttgaggatcagcgagaatgtgtgtccagacaggaatacaggaagtatggaggggccaagctaaaccggctaaacccggggaactacacagcccggattcaggccacatctctctctgggaatgggtcgtggacagatcctgtgttcttctatgtccaggccaaaacaggatatgaaaacttcatccatctgatcatcgctctgcccgtcgctgtcctgttgatcgtgggagggttggtgattatgctgtacgtcttccatagaaagagaaataacagcaggctggggaatggagtgctgtatgcctctgtgaacccggagtacttcagcgctgctgatgtgtacgttcctgatgagtgggaggtggctcgggagaagatcaccatgagccgggaacttgggcaggggtcgtttgggatggtctatgaaggagttgccaagggtgtggtgaaagatgaacctgaaaccagagtggccattaaaacagtgaacgaggccgcaagcatgcgtgagaggattgagtttctcaacgaagcttctgtgatgaaggagttcaattgtcaccatgtggtgcgattgctgggtgtggtgtcccaaggccagccaacactggtcatcatggaactgatgacacggggcgatctcaaaagttatctccggtctctgaggccagaaatggagaataatccagtcctagcacctccaagcctgagcaagatgattcagatggccggagagattgcagacggcatggcatacctcaacgccaataagttcgtccacagagaccttgctgcccggaattgcatggtagccgaagatttcacagtcaaaatcggagattttggtatgacgcgagatatctatgagacagactattaccggaaaggagggaaagggctgctgcccgtgcgctggatgtctcctgagtccctcaaggatggagtcttcaccacttactcggacgtctggtccttcggggtcgtcctctgggagatcgccacactggccgagcagccctaccagggcttgtccaacgagcaagtccttcgcttcgtcatggagggcggccttctggacaagccagacaactgtcctgacatgctgtttgaactgatgcgcatgtgctggcagtataaccccaagatgaggccttccttcctggagatcatcagcagcatcaaagaggagatggagcctggcttccgggaggtctccttctactacagcgaggagaacaagctgcccgagccggaggagctggacctggagccagagaacatggagagcgtccccctggacccctcggcctcctcgtcctccctgccactgcccgacagacactcaggacacaaggccgagaacggccccggccctggggtgctggtcctccgcgccagcttcgacgagagacagccttacgcccacatgaacgggggccgcaagaacgagcgggccttgccgctgccccagtcttcgacctgctga

SEQ ID NO: 1995 - protein, 1364 aa, synthetic construct
  REGION 1..1364: note = mutated human IGF-R1 antigen
MGWSCIILFLVATATGVHSDYKDDDDKEICGPGIDIRNDYQQLKRLENCTVIEGFLHILLISKAEDYRSYRFPKLTVITEYLLLFRVAGLESLGDLFPNLTVIRGWKLFYNYALVIFEMTNLKDIGLYNLRNITRGAIRIEKNADLCYLSTIDWSLILDAVSNNYIVGNKPPKECGDLCPGTLEEKPMCEKTTINNEYNYRCWTTNRCQKMCPSVCGKRACTENNECCHPECLGSCHTPDDNTTCVACRHYYYKGVCVPACPPGTYRFEGWRCVDRDFCANIPNAESSDSDGFVIHDDECMQECPSGFIRNSTQSMYCIPCEGPCPKVCEEEKKTKTIDSVTSAQMLQGCTIFKGNLLINIRRGNNIASELENFMGLIEVVTGYVKIRHSHALVSLSFLKNLRLILGEEQLEGNYSFYVLDNQNLQQLWDWDHRNLTIKAGKMYFAFNPKLCVSEIYRMEEVTGTKGRQSKGDINTRNNGERASCESDVLHFTSTTTSKNRIIITWHRYRPPDYRDLISFTVYYKEAPFKNVTEYDGQDACGSNSWNMVDVDLPPNKDVEPGILLHGLKPWTQYAVYVKAVTLTMVENDHIRGAKSEILYIRTNASVPSIPLDVLSASNSSSQLIVKWNPPSLPNGNLSYYIVRWQRQPQDGYLYRHNYCSKDKIPIRKYADGTIDIEEVTENPKTEVCGGEKGPCCACPKTEAEKQAEKEEAEYRKVFENFLHNSIFVPRPERKRRDVMQVANTTMSSRSRNTTAADTYNITDPEELETEYPFFESRVDNKERTVISNLRPFTLYRIDIHSCNHEAEKLGCSASNFVFARTMPAEGADDIPGPVTWEPRPENSIFLKWPEPENPNGLILMYEIKYGSQVEDQRECVSRQEYRKYGGAKLNRLNPGNYTARIQATSLSGNGSWTDPVFFYVQAKTGYENFIHLIIALPVAVLLIVGGLVIMLYVFHRKRNNSRLGNGVLYASVNPEYFSAADVYVPDEWEVAREKITMSRELGQGSFGMVYEGVAKGVVKDEPETRVAIKTVNEAASMRERIEFLNEASVMKEFNCHHVVRLLGVVSQGQPTLVIMELMTRGDLKSYLRSLRPEMENNPVLAPPSLSKMIQMAGEIADGMAYLNANKFVHRDLAARNCMVAEDFTVKIGDFGMTRDIYETDYYRKGGKGLLPVRWMSPESLKDGVFTTYSDVWSFGVVLWEIATLAEQPYQGLSNEQVLRFVMEGGLLDKPDNCPDMLFELMRMCWQYNPKMRPSFLEIISSIKEEMEPGFREVSFYYSEENKLPEPEELDLEPENMESVPLDPSASSSSLPLPDRHSGHKAENGPGPGVLVLRASFDERQPYAHMNGGRKNERALPLPQSSTC

SEQ ID NO: 1996 - DNA, 4101 bp, synthetic construct
  misc_feature 1..4101: note = mutated murine IGF-R1 antigen
  source 1..4101: mol_type = other DNA
atgggatggagctgtatcatcctcttcttggtagcaacagctacaggtgtacactccgattacaaggacgacgatgacaaggaaatctgcgggccaggcatcgacatccgcaacgactatcagcagctgaagcgcctggagaactgcacggtgatcgagggctacctccacatcctgctcatctccaaggccgaggactaccgcagctaccgcttccccaagctcacggtcattaccgagtacttgctgctgttccgagtggctggcctcgagagcctcggagacctcttccccaacctcacggtcatccgcggctggaaactcttctacaactacgccctggtcatcttcgagatgaccaatctcaaggatattgggctttacaacctgaggaacattactcggggggccatcaggattgagaaaaatgctgacctctgttacctctccactgtggactggtccctgatcctggatgcggtgtccaataactacattgtggggaataagcccccaaaggaatgtggggacctgtgtccagggaccatggaggagaagccgatgtgtgagaagaccaccatcaacaatgagtacaactaccgctgctggaccacaaaccgctgccagaaaatgtgcccaagcacgtgtgggaagcgggcgtgcaccgagaacaatgagtgctgccaccccgagtgcctgggcagctgcagcgcgcctgacaacgacacggcctgtgtagcttgccgccactactactatgccggtgtctgtgtgcctgcctgcccgcccaacacctacaggtttgagggctggcgctgtgtggaccgtgacttctgcgccaacatcctcagcgccgagagcagcgactccgaggggtttgtgatccacgacggcgagtgcatgcaggagtgcccctcgggcttcatccgcaacggcagccagagcatgtactgcatcccttgtgaaggtccttgcccgaaagtctgcggcgatgaagagaagaaaacgaaaaccatcgattcggtgacttctgctcaaatgctccaaggatgcaccatcctgaagggcaatctgcttattaacatccggagaggcaataacattgcctcggagttggagaacttcatggggctcatcgaggtggtgaccggctacgtgaagatccgccattctcatgccttggtctccttgtccttcctgaagaaccttcgtctcatcttaggagaggagcagctggaagggaactactccttctatgtcctagacaaccagaacttgcagcagctgtgggactggaaccaccggaacctgaccgtcaggtccggaaagatgtactttgctttcaatcccaagctgtgtgtctccgaaatttaccgcatggaggaagtgaccggaaccaagggacgccagagcaaaggggacataaacaccaggaacaacggagagcgagcttcctgtgaaagtgatgttctccgtttcacctccaccacgacctggaagaaccgaatcatcataacgtggcaccggtaccggccgccggactaccgggatctcatcagcttcacagtttactacaaggaggcaccatttaaaaacgttacggaatatgacgggcaggatgcctgtggctccaacagctggaacatggtggatgtagacctgcctccgaacaaggagggcgagcctggcattttactgcatgggctgaagccctggacccagtatgctgtctatgtcaaggctgtgaccctcaccatggtggaaaacgaccatatccgtggggccaaaagtgaaatcttgtacattcgcaccaatgcttcagtcccttccattcccctagatgtcctctcagcatcaaactcttcctctcagctgattgtgaagtggaatcctccaactctgcccaatggtaacttgagttactacattgtgaggtggcagcggcagccccaggatggttacctgtaccggcacaactactgctccaaagacaaaatacccatcagaaagtacgccgatggtaccatcgacgtggaggaggtgacggaaaatcccaagacagaagtgtgtggtggtgataaagggccatgctgcgcttgccctaaaactgaagctgagaagcaggctgagaaggaggaggctgagtaccgtaaagtctttgagaatttccttcacaattccatctttgtgcccaggcccgaaaggaggcggagagacgtcatgcaagtggccaacacgaccatgtccagccgaagcaggaacaccacggtagctgacacctacaatatcacagacccggaggagttcgagacagagtaccctttctttgagagcagagtggataacaaggagaggactgtcatctccaacctccggcctttcactctgtaccgcatcgatatccacagctgcaaccacgaggctgagaagctgggctgcagcgcctccaacttcgtctttgcgagaaccatgccagcagaaggagcagatgatatccctggtccggtgacctgggagccaagacccgaaaactccatctttttaaagtggccagaacccgagaaccccaacggattgatcctaatgtatgaaattaaatacgggtcgcaagtcgaggatcagcgggaatgtgtgtccagacaggagtacaggaagtacggaggggccaaactcaaccgtctaaacccagggaactatacagcccggattcaggctacctccctctctgggaatgggtcatggacagatcctgtgttcttctatgtccccgccaaaacgacgtatgagaacttcatgcatctgatcattgctctgccggttgccatcctgctgatcgttggggggctggttatcatgctgtatgtcttccatagaaagagaaataacagcaggttgggcaatggagtgctgtatgcttctgtgaaccccgagtatttcagcgcagctgatgtgtacgtgcctgatgaatgggaggtagctcgagagaagatcaccatgaaccgggagctcggacaagggtcctttgggatggtctatgaaggagtggccaagggtgtggtcaaggatgaacccgaaaccagagtggccatcaagacggtaaacgaggctgcaagtatgcgtgaaagaatcgagtttctcaacgaggcctcggtgatgaaggagttcaattgtcaccatgtggtccggttgctgggtgtggtatcccaaggccagcccaccctggtcatcatggaactaatgacacgcggtgatctcaaaagttatctccggtctctgaggccagaagtggagcagaataatctagtcctcattcctccgagcttaagcaagatgatccagatggctggagagattgcagatggcatggcctacctcaatgccaacaagttcgtccacagagaccttgctgctaggaactgcatggtagccgaagatttcacagtcaaaattggagatttcggtatgacacgagacatctacgagacggactactaccggaaaggcgggaaggggttgctgcctgtgcgctggatgtctcccgagtccctcaaggatggtgtcttcactactcattctgatgtctggtccttcggggtcgtcctctgggagatcgccacgctggctgagcagccctaccagggcttgtccaacgagcaagttcttcgtttcgtcatggagggtggccttctggacaagccggacaactgccctgatatgctgtttgaacttatgcgcatgtgctggcagtataaccccaagatgcggccctccttcctggagatcatcggcagcatcaaggatgagatggagcccagcttccaggaggtctccttctactacagcgaggagaacaagcctcccgagccagaggagctggagatggagcctgagaacatggagagcgtcccactggacccttcggcctcctcagcctccctgcctctgcctgaaagacactcaggacacaaggctgagaatggcccgggccctggcgtgctcgttctccgcgccagttttgatgagagacagccttacgctcacatgaacgggggacgcgccaacgagagggccttgcctctgccccagtcctcgacctgctga

SEQ ID NO: 1997 - protein, 1366 aa, synthetic construct
  REGION 1..1366: note = mutated murine IGF-R1 antigen
MGWSCIILFLVATATGVHSDYKDDDDKEICGPGIDIRNDYQQLKRLENCTVIEGYLHILLISKAEDYRSYRFPKLTVITEYLLLFRVAGLESLGDLFPNLTVIRGWKLFYNYALVIFEMTNLKDIGLYNLRNITRGAIRIEKNADLCYLSTVDWSLILDAVSNNYIVGNKPPKECGDLCPGTMEEKPMCEKTTINNEYNYRCWTTNRCQKMCPSTCGKRACTENNECCHPECLGSCSAPDNDTACVACRHYYYAGVCVPACPPNTYRFEGWRCVDRDFCANILSAESSDSEGFVIHDGECMQECPSGFIRNGSQSMYCIPCEGPCPKVCGDEEKKTKTIDSVTSAQMLQGCTILKGNLLINIRRGNNIASELENFMGLIEVVTGYVKIRHSHALVSLSFLKNLRLILGEEQLEGNYSFYVLDNQNLQQLWDWNHRNLTVRSGKMYFAFNPKLCVSEIYRMEEVTGTKGRQSKGDINTRNNGERASCESDVLRFTSTTTWKNRIIITWHRYRPPDYRDLISFTVYYKEAPFKNVTEYDGQDACGSNSWNMVDVDLPPNKEGEPGILLHGLKPWTQYAVYVKAVTLTMVENDHIRGAKSEILYIRTNASVPSIPLDVLSASNSSSQLIVKWNPPTLPNGNLSYYIVRWQRQPQDGYLYRHNYCSKDKIPIRKYADGTIDVEEVTENPKTEVCGGDKGPCCACPKTEAEKQAEKEEAEYRKVFENFLHNSIFVPRPERRRRDVMQVANTTMSSRSRNTTVADTYNITDPEEFETEYPFFESRVDNKERTVISNLRPFTLYRIDIHSCNHEAEKLGCSASNFVFARTMPAEGADDIPGPVTWEPRPENSIFLKWPEPENPNGLILMYEIKYGSQVEDQRECVSRQEYRKYGGAKLNRLNPGNYTARIQATSLSGNGSWTDPVFFYVPAKTTYENFMHLIIALPVAILLIVGGLVIMLYVFHRKRNNSRLGNGVLYASVNPEYFSAADVYVPDEWEVAREKITMNRELGQGSFGMVYEGVAKGVVKDEPETRVAIKTVNEAASMRERIEFLNEASVMKEFNCHHVVRLLGVVSQGQPTLVIMELMTRGDLKSYLRSLRPEVEQNNLVLIPPSLSKMIQMAGEIADGMAYLNANKFVHRDLAARNCMVAEDFTVKIGDFGMTRDIYETDYYRKGGKGLLPVRWMSPESLKDGVFTTHSDVWSFGVVLWEIATLAEQPYQGLSNEQVLRFVMEGGLLDKPDNCPDMLFELMRMCWQYNPKMRPSFLEIIGSIKDEMEPSFQEVSFYYSEENKPPEPEELEMEPENMESVPLDPSASSASLPLPERHSGHKAENGPGPGVLVLRASFDERQPYAHMNGGRANERALPLPQSSTC

SEQ ID NO: 1998 - DNA, 4104 bp, synthetic construct
  misc_feature 1..4104: note = macaque IGF-R1
  source 1..4104: mol_type = other DNA
atgaagtctggctctggagaagggtccccgacctcgctgtgggggctcctgtttctctccgccgcgctctcgctctggccgacgagtggagaaatctgtgggccgggcatcgacatccgcaacgactatcagcagctgaagcgcctggagaactgcacggtgatcgagggctacctccacatcctgctcatctccaaggccgaggactaccgcagctaccgcttccccaagctcacggtcatcaccgagtacttgctgttgttccgagtggctggcctagagagcctcggagacctgttccccaacctcacggtaatccgcggctggaaactcttctacaactacgccctggtcatctttgagatgaccaatctcaaggatattgggctttacaacctgaggaacattactcggggggccatcaggattgagaaaaatgctgacctctgttacctctccactgtggactggtccctgatcctggatgcagtgtccaataactacattgtggggaataagcccccaaaggaatgcggggacctgtgtccggggaccatggaggagaagccgatgtgcgagaagaccaccatcaacaatgagtacaactaccgctgctggaccacaaaccgctgccagaaaatgtgcccgagtgcctgtgggaagagggcatgcaccgagaacaacgagtgctgccaccccgagtgcctgggcagctgcagcgcgcctgacaacgacacggcctgtgtagcttgccgccactactactacgccggtgtctgcgtgcctgcctgcccgcccaacacctacaggtttgagggctggcgctgtgtggaccgtgacttctgcgccaacatcctcagcgccgagagcagcgactccgagggtttcgtgatccacgacggcgagtgcatgcaggagtgcccctcaggcttcatccgcaacggcagccagagcatgtactgcatcccttgtgaaggtccttgccccaaggtctgtgaggaagaaaagaaaacaaagaccattgattctgttacttctgctcagatgctccaaggatgcaccatcttcaagggcaatttgctcattaacatccgacgggggaataacattgcttcagaactggagaacttcatggggctcatcgaggtggtgacgggctacgtgaagatccgccattcccatgccttggtctccttgtccttcctaaaaaaccttcgcctcatcttaggagaggagcagctagaagggaattactccttctacgtcctcgacaaccagaacttgcagcaactatgggactgggaccaccgcaacctgaccatcaaagcagggaaaatgtactttgctttcaatcccaaattgtgtgtttcggaaatttaccgcatggaggaagtgacggggactaaagggcgccaaagcaaaggggacataaacaccaggaacaacggggaaagagcctcctgtgaaagtgacgtcctgcatttcacctccaccaccacgtggaagaatcgcatcatcataacctggcaccggtaccggccccctgactacagggatctcatcagcttcaccgtttactacaaggaagcaccttttaagaatgtcacggagtatgatgggcaggatgcctgcggctccaacagctggaacatggtggatgtggacctcccgcccaacaaggacgtggagcccggcatcttactgcatgggctgaagccctggactcagtacgccgtttacgtcaaggctgtgaccctcaccatggtggagaacgaccatatccgtggggccaagagtgagatcttgtacattcgcaccaatgcttcagttccttccattcccttggacgttctttcagcatcgaactcctcttctcagttaatcgtgaagtggaaccctccctctctgcccaacggcaacctgagttactacattgtgcgctggcagcggcagcctcaggacggctacctttaccggcacaattactgctccaaagacaaaatccccatcaggaagtatgccgacggcaccattgacattgaggaggtcacagagaacccgaagactgaggtgtgtggtggagagaaagggccttgctgcgcctgccccaaaactgaagctgagaagcaggccgagaaggaggaggctgagtaccgcaaagtctttgagaatttcctgcacaactccatctttgtgcccagacctgaaaggaagcggagagatgtcatgcaagtggccaacaccaccatgtccagccgaagcaggaacaccacggtggcagacacctacaacatcacagatctggaagagctagagacagagtaccctttctttgagagcagagtggataataaggagagaactgtcatttctaaccttcggcctttcacattgtaccgcattgatatccacagctgcaaccacgaggctgagaaactgggctgcagcgcctccaactttgtctttgcaaggactatgcctgcagaaggagcagatgacattcctgggccagtgacctgggagccaaggcctgaaaactccatctttttaaagtggccagaacctgagaatcccaatggattgattctaatgtatgaaataaaatacggatcacaagttgaggatcagcgagaatgtgtgtccagacaggaatacaggaagtatggaggggccaagctaaaccggctaaacccagggaactacacagcccggattcaggctacatctctctctgggaatgggtcgtggacagatcctgtgttcttctatgtccaggccaaaacaggatatgaaaacttcatccatctgatcatcgctctgcccgtcgctgtcctgttgatcgtgggagggttggtgatcatgctgtacgtcttccatagaaagagaaataacagcaggctggggaatggagtgctgtacgcgtctgtgaacccggagtacttcagcgctgcggatgtgtacgttcctgatgagtgggaggtggctcgggagaagatcaccatgagccgggaacttgggcaggggtcgtttgggatggtctatgaaggagttgccaagggtgtggtgaaagacgaacctgaaaccagagtggccattaaaacagtgaacgaggccgcgagcatgcgtgaaaggatcgagtttctcaacgaggcttctgtgatgaaggagttcaattgtcaccatgtggtgcggttgctgggtgtggtgtcccagggccagccaacgctggtcatcatggaactgatgacgcggggcgatctcaaaagttatctccggtctctgaggccagaaatggagaataatccagtcctagcacctccaagcctaagcaagatgattcagatggctggagagattgcagacggcatggcatacctcaacgccaacaagttcgtccacagagaccttgctgcccggaattgcatggtagccgaggatttcacagtcaaaattggagattttgggatgacgcgagatatctatgagacagactattaccggaaaggagggaaagggctgttgcccgtgcgctggatgtctcccgagtccctcaaggatggagtcttcaccacttactcggacgtctggtccttcggggttgtcctctgggagatcgccacactggccgagcagccctaccagggcttgtccaacgagcaagtccttcgcttcgtcatggagggcggccttctggacaagccagacaactgccccgacatgctgtttgaattgatgcgcatgtgctggcagtacaaccccaagatgaggccttccttcctggagatcatcagcagcatcaaagacgagatggagcctggcttccgggaggtctccttctactacagtgaggagaacaagctgcccgagccggaggagctggacctggagccagagaacatggagagcgtccccctggacccctcggcctcctcgtcctccctgccactgcccgacagacactcaggacacaaggccgagaacggccccggccctggagtgctggtgctccgcgccagcttcgatgagagacagccttacgcacacatgaacggtggccgcaagaacgagcgggccttgccgctgccccagtcttcgacctgctga

SEQ ID NO: 1999 - protein, 1367 aa, synthetic construct
  REGION 1..1367: note = macaque IGF-R1
MKSGSGEGSPTSLWGLLFLSAALSLWPTSGEICGPGIDIRNDYQQLKRLENCTVIEGYLHILLISKAEDYRSYRFPKLTVITEYLLLFRVAGLESLGDLFPNLTVIRGWKLFYNYALVIFEMTNLKDIGLYNLRNITRGAIRIEKNADLCYLSTVDWSLILDAVSNNYIVGNKPPKECGDLCPGTMEEKPMCEKTTINNEYNYRCWTTNRCQKMCPSACGKRACTENNECCHPECLGSCSAPDNDTACVACRHYYYAGVCVPACPPNTYRFEGWRCVDRDFCANILSAESSDSEGFVIHDGECMQECPSGFIRNGSQSMYCIPCEGPCPKVCEEEKKTKTIDSVTSAQMLQGCTIFKGNLLINIRRGNNIASELENFMGLIEVVTGYVKIRHSHALVSLSFLKNLRLILGEEQLEGNYSFYVLDNQNLQQLWDWDHRNLTIKAGKMYFAFNPKLCVSEIYRMEEVTGTKGRQSKGDINTRNNGERASCESDVLHFTSTTTWKNRIIITWHRYRPPDYRDLISFTVYYKEAPFKNVTEYDGQDACGSNSWNMVDVDLPPNKDVEPGILLHGLKPWTQYAVYVKAVTLTMVENDHIRGAKSEILYIRTNASVPSIPLDVLSASNSSSQLIVKWNPPSLPNGNLSYYIVRWQRQPQDGYLYRHNYCSKDKIPIRKYADGTIDIEEVTENPKTEVCGGEKGPCCACPKTEAEKQAEKEEAEYRKVFENFLHNSIFVPRPERKRRDVMQVANTTMSSRSRNTTVADTYNITDLEELETEYPFFESRVDNKERTVISNLRPFTLYRIDIHSCNHEAEKLGCSASNFVFARTMPAEGADDIPGPVTWEPRPENSIFLKWPEPENPNGLILMYEIKYGSQVEDQRECVSRQEYRKYGGAKLNRLNPGNYTARIQATSLSGNGSWTDPVFFYVQAKTGYENFIHLIIALPVAVLLIVGGLVIMLYVFHRKRNNSRLGNGVLYASVNPEYFSAADVYVPDEWEVAREKITMSRELGQGSFGMVYEGVAKGVVKDEPETRVAIKTVNEAASMRERIEFLNEASVMKEFNCHHVVRLLGVVSQGQPTLVIMELMTRGDLKSYLRSLRPEMENNPVLAPPSLSKMIQMAGEIADGMAYLNANKFVHRDLAARNCMVAEDFTVKIGDFGMTRDIYETDYYRKGGKGLLPVRWMSPESLKDGVFTTYSDVWSFGVVLWEIATLAEQPYQGLSNEQVLRFVMEGGLLDKPDNCPDMLFELMRMCWQYNPKMRPSFLEIISSIKDEMEPGFREVSFYYSEENKLPEPEELDLEPENMESVPLDPSASSSSLPLPDRHSGHKAENGPGPGVLVLRASFDERQPYAHMNGGRKNERALPLPQSSTC

SEQ ID NO: 2000 - protein, 362 aa, Homo sapiens
PAIYKVFPNSAPLEGGTRLTICGWDFGFRRNNKFDLKKTRVLLGNESCTLTLSESTMNTLKCTVGPAMNKHFNMSIIISNGHGTTQYSTFSYVDPVITSISPKYGPMAGGTLLTLTGNYLNSGNSRHISIGGKTCTLKSVSNSILECYTPAQTISTEFAVKLKIDLANRETSIFSYREDPIVYEIHPTKSFISGGSTITGVGKNLNSVSVPRMVINVHEAGRNFTVACQHRSNSEIICCTTPSLQQLNLQLPLKTKAFFMLDGILSKYFDLIYVHNPVFKPFEKPVMISMGNENVLEIKGNDIDPEAVKGEVLKVGNKSCENIHLHSEAVLCTVPNDLLKLNSELNIEWKQAISSTVLGKVI

SEQ ID NO: 2001 - protein, 42 aa, Homo sapiens
CRHFQSCSQCLSAPPFVQCGWCHDKCVRSEECLSGTWTQQIC

SEQ ID NO: 2002 - protein, 212 aa, Homo sapiens
STKKEVFNILQAAYVSKPGAQLARQIGASLNDDILFGVFAQSKPDSAEPMDRSAMCAFPIKYVNDFFNKIVNKNNVRCLQHFYGPNHEHCFNRTLLRNSSGCEARRDEYRTEFTTALQRVDLFMGQFSEVLLTSISTFIKGDLTIANLGTSEGRFMQVVVSRSGPSTPHVNFLLDSHPVSPEVIVEHTLNQNGYTLVITGKKITKIPLNGLG

SEQ ID NO: 2003 - protein, 907 aa, Homo sapiens
ECKEALAKSEMNVNMKYQLPNFTAETPIQNVILHEHHIFLGATNYIYVLNEEDLQKVAEYKTGPVLEHPDCFPCQDCSSKANLSGGVWKDNINMALVVDTYYDDQLISCGSVNRGTCQRHVFPHNHTADIQSEVHCIFSPQIEEPSQCPDCVVSALGAKVLSSVKDRFINFFVGNTINSSYFPDHPLHSISVRRLKETKDGFMFLTDQSYIDVLPEFRDSYPIKYVHAFESNNFIYFLTVQRETLDAQTFHTRIIRFCSINSGLHSYMEMPLECILTEKRKKRSTKKEVFNILQAAYVSKPGAQLARQIGASLNDDILFGVFAQSKPDSAEPMDRSAMCAFPIKYVNDFFNKIVNKNNVRCLQHFYGPNHEHCFNRTLLRNSSGCEARRDEYRTEFTTALQRVDLFMGQFSEVLLTSISTFIKGDLTIANLGTSEGRFMQVVVSRSGPSTPHVNFLLDSHPVSPEVIVEHTLNQNGYTLVITGKKITKIPLNGLGCRHFQSCSQCLSAPPFVQCGWCHDKCVRSEECLSGTWTQQICLPAIYKVFPNSAPLEGGTRLTICGWDFGFRRNNKFDLKKTRVLLGNESCTLTLSESTMNTLKCTVGPAMNKHFNMSIIISNGHGTTQYSTFSYVDPVITSISPKYGPMAGGTLLTLTGNYLNSGNSRHISIGGKTCTLKSVSNSILECYTPAQTISTEFAVKLKIDLANRETSIFSYREDPIVYEIHPTKSFISGGSTITGVGKNLNSVSVPRMVINVHEAGRNFTVACQHRSNSEIICCTTPSLQQLNLQLPLKTKAFFMLDGILSKYFDLIYVHNPVFKPFEKPVMISMGNENVLEIKGNDIDPEAVKGEVLKVGNKSCENIHLHSEAVLCTVPNDLLKLNSELNIEWKQAISSTVLGKVIVQPDQNF

SEQ ID NO: 2004 - protein, 326 aa, Homo sapiens
ASQDLGDELLDDGEDEEDEDEAWKAFNGGWTEMPGILWMEPTQPPDFALAYRPSFPEDREPQIPYPEPTWPPPLSAPRVPYHSSVLSVTRPVVVSATHPTLPSAHQPPVIPATHPALSRDHQIPVIAANYPDLPSAYQPGILSVSHSAQPPAHQPPMISTKYPELFPAHQSPMFPDTRVAGTQTTTHLPGIPPNHAPLVTTLGAQLPPQAPDALVLRTQATQLPIIPTAQPSLTTTSRSPVSPAHQISVPAATQPAALPTLLPSQSPTNQTSPISPTHPHSKAPQIPREDGPSPKLALWLPSPAPTAAPTALGEAGLAEHSQRDDR

SEQ ID NO: 2005 - protein, 116 aa, Homo sapiens
CSPDNGGCEHECVEEVDGHVSCRCTEGFRLAADGRSCEDPCAQAPCEQQCEPGGPQGYSCHCRLGFRPAEDDPHRCVDTDECQIAGVCQQMCVNYVGGFECYCSEGHELEADGISC

SEQ ID NO: 2006 - protein, 55 aa, Homo sapiens
PAVYTTPFHLVSTEFEWLPFGSVAAVQCQAGRGASLLCVKQPEGGVGWSRAGPLC

SEQ ID NO: 2007 - protein, 665 aa, Homo sapiens
WAAEPRAACGPSSCYALFPRRRTFLEAWRACRELGGDLATPRTPEEAQRVDSLVGAGPASRLLWIGLQRQARQCQLQRPLRGFTWTTGDQDTAFTNWAQPASGGPCPAQRCVALEASGEHRWLEGSCTLAVDGYLCQFGFEGACPALQDEAGQAGPAVYTTPFHLVSTEFEWLPFGSVAAVQCQAGRGASLLCVKQPEGGVGWSRAGPLCLGTGCSPDNGGCEHECVEEVDGHVSCRCTEGFRLAADGRSCEDPCAQAPCEQQCEPGGPQGYSCHCRLGFRPAEDDPHRCVDTDECQIAGVCQQMCVNYVGGFECYCSEGHELEADGISCSPAGAMGAQASQDLGDELLDDGEDEEDEDEAWKAFNGGWTEMPGILWMEPTQPPDFALAYRPSFPEDREPQIPYPEPTWPPPLSAPRVPYHSSVLSVTRPVVVSATHPTLPSAHQPPVIPATHPALSRDHQIPVIAANYPDLPSAYQPGILSVSHSAQPPAHQPPMISTKYPELFPAHQSPMFPDTRVAGTQTTTHLPGIPPNHAPLVTTLGAQLPPQAPDALVLRTQATQLPIIPTAQPSLTTTSRSPVSPAHQISVPAATQPAALPTLLPSQSPTNQTSPISPTHPHSKAPQIPREDGPSPKLALWLPSPAPTAAPTALGEAGLAEHSQRDDR

SEQ ID NO: 2008 - protein, 447 aa, Homo sapiens
SDVLHFTSTTTSKNRIIITWHRYRPPDYRDLISFTVYYKEAPFKNVTEYDGQDACGSNSWNMVDVDLPPNKDVEPGILLHGLKPWTQYAVYVKAVTLTMVENDHIRGAKSEILYIRTNASVPSIPLDVLSASNSSSQLIVKWNPPSLPNGNLSYYIVRWQRQPQDGYLYRHNYCSKDKIPIRKYADGTIDIEEVTENPKTEVCGGEKGPCCACPKTEAEKQAEKEEAEYRKVFENFLHNSIFVPRPERKRRDVMQVANTTMSSRSRNTTAADTYNITDPEELETEYPFFESRVDNKERTVISNLRPFTLYRIDIHSCNHEAEKLGCSASNFVFARTMPAEGADDIPGPVTWEPRPENSIFLKWPEPENPNGLILMYEIKYGSQVEDQRECVSRQEYRKYGGAKLNRLNPGNYTARIQATSLSGNGSWTDPVFFYVQAKTGYENFIHL

SEQ ID NO: 2009 - protein, 160 aa, Homo sapiens
KVCEEEKKTKTIDSVTSAQMLQGCTIFKGNLLINIRRGNNIASELENFMGLIEVVTGYVKIRHSHALVSLSFLKNLRLILGEEQLEGNYSFYVLDNQNLQQLWDWDHRNLTIKAGKMYFAFNPKLCVSEIYRMEEVTGTKGRQSKGDINTRNNGERASCE

SEQ ID NO: 2010 - protein, 906 aa, Homo sapiens
EICGPGIDIRNDYQQLKRLENCTVIEGYLHILLISKAEDYRSYRFPKLTVITEYLLLFRVAGLESLGDLFPNLTVIRGWKLFYNYALVIFEMTNLKDIGLYNLRNITRGAIRIEKNADLCYLSTVDWSLILDAVSNNYIVGNKPPKECGDLCPGTMEEKPMCEKTTINNEYNYRCWTTNRCQKMCPSTCGKRACTENNECCHPECLGSCSAPDNDTACVACRHYYYAGVCVPACPPNTYRFEGWRCVDRDFCANILSAESSDSEGFVIHDGECMQECPSGFIRNGSQSMYCIPCEGPCPKVCEEEKKTKTIDSVTSAQMLQGCTIFKGNLLINIRRGNNIASELENFMGLIEVVTGYVKIRHSHALVSLSFLKNLRLILGEEQLEGNYSFYVLDNQNLQQLWDWDHRNLTIKAGKMYFAFNPKLCVSEIYRMEEVTGTKGRQSKGDINTRNNGERASCESDVLHFTSTTTSKNRIIITWHRYRPPDYRDLISFTVYYKEAPFKNVTEYDGQDACGSNSWNMVDVDLPPNKDVEPGILLHGLKPWTQYAVYVKAVTLTMVENDHIRGAKSEILYIRTNASVPSIPLDVLSASNSSSQLIVKWNPPSLPNGNLSYYIVRWQRQPQDGYLYRHNYCSKDKIPIRKYADGTIDIEEVTENPKTEVCGGEKGPCCACPKTEAEKQAEKEEAEYRKVFENFLHNSIFVPRPERKRRDVMQVANTTMSSRSRNTTAADTYNITDPEELETEYPFFESRVDNKERTVISNLRPFTLYRIDIHSCNHEAEKLGCSASNFVFARTMPAEGADDIPGPVTWEPRPENSIFLKWPEPENPNGLILMYEIKYGSQVEDQRECVSRQEYRKYGGAKLNRLNPGNYTARIQATSLSGNGSWTDPVFFYVQAKTGYENFIHL

SEQ ID NO: 2011 - DNA, 4104 bp, synthetic construct; identical to SEQ ID NO: 1988
  misc_feature 1..4104: note = IGF-1R-1
  source 1..4104: mol_type = other DNA

SEQ ID NO: 2012 - protein, 1367 aa, synthetic construct; identical to SEQ ID NO: 1989
  REGION 1..1367: note = IGF-1R-2

SEQ ID NO: 2013 - DNA, 4104 bp, synthetic construct
  misc_feature 1..4104: note = IGF-1R-3
  source 1..4104: mol_type = other DNA
atgaagtctggctctggagaagggtccccgacctcgctgtgggggctcctgtttctctccgccgcgctctcgctctggccgacgagtggagaaatctgtgggccgggcatcgacatccgcaacgactatcagcagctgaagcgcctggagaactgcacggtgatcgagggctacctccacatcctgctcatctccaaggccgaggactaccgcagctaccgcttccccaagctcacggtcatcaccgagtacttgctgttgttccgagtggctggcctagagagcctcggagacctgttccccaacctcacggtaatccgcggctggaaactcttctacaactacgcactagtcatctttgagatgaccaatctcaaggatattgggctttacaacctgaggaacattactcggggggccatcaggattgagaaaaatgctgacctctgttacctctccactgtggactggtccctgatcctggatgcagtgtccaataactacattgtggggaataagcccccaaaggaatgcggggacctgtgtccggggaccatggaggagaagccgatgtgcgagaagaccaccatcaacaatgagtacaactaccgctgctggaccacaaaccgctgccagaaaatgtgcccgagtgcctgtgggaagagggcatgcaccgagaacaacgagtgctgccaccccgagtgcctgggcagctgcagcgcgcctgacaacgacacggcctgtgtagcttgccgccactactactacgccggtgtctgcgtgcctgcctgcccgcccaacacctacaggtttgagggctggcgctgtgtggaccgtgacttctgcgccaacatcctcagcgccgagagcagcgactccgagggtttcgtgatccacgacggcgagtgcatgcaggagtgcccctcaggcttcatccgcaacggcagccagagcatgtactgcatcccttgtgaaggtccttgccccaaggtctgtgaggaagaaaagaaaacaaagaccattgattctgttacttctgctcagatgctccaaggatgcaccatcttcaagggcaatttgctcattaacatccgacgggggaataacattgcttcagaactggagaacttcatggggctcatcgaggtggtgacgggctacgtgaagatccgccattcccatgccttggtctccttgtccttcctaaaaaaccttcgcctcatcttaggagaggagcagctagaagggaattactccttctacgtcctcgacaaccagaacttgcagcaactatgggactgggaccaccgcaacctgaccatcaaagcagggaaaatgtactttgctttcaatcccaaattgtgtgtttcggaaatttaccgcatggaggaagtgacggggactaaagggcgccaaagcaaaggggacataaacaccaggaacaacggggaaagagcctcctgtgaaagtgacgtcctgcatttcacctccaccaccacgtggaagaatcgcatcatcataacctggcaccggtaccggccccctgactacagggatctcatcagcttcaccgtttactacaaggaagcaccttttaagaatgtcacggagtatgatgggcaggatgcctgcggctccaacagctggaacatggtggatgtggacctcccgcccaacaaggacgtggagcccggcatcttactgcatgggctgaagccctggactcagtacgccgtttacgtcaaggctgtgaccctcaccatggtggagaacgaccatatccgtggggccaagagtgagatcttgtacattcgcaccaatgcttcagttccttccattcccttggacgttctttcagcatcgaactcctcttctcagttaatcgtgaagtggaaccctccctctctgcccaacggcaacctgagttactacattgtgcgctggcagcggcagcctcaggacggctacctttaccggcacaattactgctccaaagacaaaatccccatcaggaagtatgccgacggcaccattgacattgaggaggtcacagagaacccgaagactgaggtgtgtggtggagagaaagggccttgctgcgcctgccccaaaactgaagctgagaagcaggccgagaaggaggaggctgagtaccgcaaagtctttgagaatttcctgcacaactccatctttgtgcccagacctgaaaggaagcggagagatgtcatgcaagtggccaacaccaccatgtccagccgaagcaggaacaccacggtggcagacacctacaacatcacagatctggaagagctagagacagagtaccctttctttgagagcagagtggataataaggagagaactgtcatttctaaccttcggcctttcacattgtaccgcattgatatccacagctgcaaccacgaggctgagaaactgggctgcagcgcctccaactttgtctttgcaaggactatgcctgcagaaggagcagatgacattcctgggccagtgacctgggagccaaggcctgaaaactccatctttttaaagtggccagaacctgagaatcccaatggattgattctaatgtatgaaataaaatacggatcacaagttgaggatcagcgagaatgtgtgtccagacaggaatacaggaagtatggaggggccaagctaaaccggctaaaccccgggaactacacagcccggattcaggctacatctctctctgggaatgggtcgtggacagatcctgtgttcttctatgtccaggccaaaacaggatatgaaaacttcatccatctgatcatcgctctgcccgtcgctgtcctgttgatcgtgggagggttggtgatcatgctgtacgtcttccatagaaagagaaataacagcaggctggggaatggagtgctgtacgcgtctgtgaacccggagtacttcagcgctgcggatgtgtacgttcctgatgagtgggaggtggctcgggagaagatcaccatgagccgggaacttgggcaggggtcgtttgggatggtctatgaaggagttgccaagggtgtggtgaaagacgaacctgaaaccagagtggccattaaaacagtgaacgaggccgcgagcatgcgtgaaaggatcgagtttctcaacgaggcttctgtgatgaaggagttcaattgtcaccatgtggtgcggttgctgggtgtggtgtcccagggccagccaacgctggtcatcatggaactgatgacgcggggcgatctcaaaagttatctccggtctctgaggccagaaatggagaataatccagtcctagcacctccaagcctaagcaagatgattcagatggctggagagattgcagacggcatggcatacctcaacgccaacaagttcgtccacagagaccttgctgcccggaattgcatggtagccgaggatttcacagtcaaaattggagattttgggatgacgcgagatatctatgagacagactattaccggaaaggagggaaagggctgttgcccgtgcgctggatgtctcccgagtccctcaaggatggagtcttcaccacttactcggacgtctggtccttcggggttgtcctctgggagatcgccacactggccgagcagccctaccagggcttgtccaacgagcaagtccttcgcttcgtcatggagggcggccttctggacaagccagacaactgccccgacatgctgtttgaattgatgcgcatgtgctggcagtacaaccccaagatgaggccttccttcctggagatcatcagcagcatcaaagacgagatggagcctggcttccgggaggtctccttctactacagtgaggagaacaagctgcccgagccggaggagctggacctggagccagagaacatggagagcgtccccctggacccctcggcctcctcgtcctccctgccactgcccgacagacactcaggacacaaggccgagaacggccccggccctggagtgctggtgctccgcgccagcttcgatgagagacagccttacgcacacatgaacggtggccgcaagaacgagcgggccttgccgctgccccagtcttcgacctgctga

SEQ ID NO: 2014 - protein, 1367 aa, synthetic construct; identical to SEQ ID NO: 1999
  REGION 1..1367: note = IGF-1R-4

SEQ ID NO: 2015 - protein, 130 aa, synthetic construct
  REGION 1..130: note = IGF1R2-H
EVQLVQSGAEVKKPGSSVKVSCKASGGTFSSYAISWVRQAPGQGLEWMGGIIPIFGTANYAQKFQGRVTITADKSTSTAYMELSSLRSEDTAVYYCARAPLRFLEWSTQDHYYYYYMDVWGKGTTVTVSS

SEQ ID NO: 2016 - protein, 5 aa, synthetic construct
  REGION 1..5: note = IGF1R2-HCDR1
SYAIS

SEQ ID NO: 2017 - protein, 17 aa, synthetic construct
  REGION 1..17: note = IGF1R2-HCDR2
GIIPIFGTANYAQKFQG

SEQ ID NO: 2018 - protein, 21 aa, synthetic construct
  REGION 1..21: note = IGF1R2-HCDR3
APLRFLEWSTQDHYYYYYMDV

SEQ ID NO: 2019 - DNA, 390 bp, synthetic construct
  misc_feature 1..390: note = IGF1R2-H
  source 1..390: mol_type = other DNA
gaggtgcaactagtccagagcggagcggaggtgaagaaacctggatccagcgtgaaagtgagctgtaaggctagcggaggcacattctcctcgtatgccattagctgggttagacaagcacctggacaaggactggagtggatgggagggataatcccaatcttcggaactgccaactacgcacagaagttccaaggacgggtcaccatcactgcggataagtccacctcgactgcctacatggagctcagtagcttacggagcgaagacacagccgtatactattgcgcacgagcacccctaagattcctggagtggagcacgcaggatcactattactattactacatggacgtgtggggaaagggaacgactgtcaccgtttcaagc

SEQ ID NO: 2020 - protein, 108 aa, synthetic construct
  REGION 1..108: note = IGF1R2-L
SSELTQDPAVSVALGQTVRITCQGDSLRSYYATWYQQKPGQAPILVIYGENKRPSGIPDRFSGSSSGNTASLTITGAQAEDEADYYCKSRDGSGQHLVFGGGTKLTVL

SEQ ID NO: 2021 - protein, 11 aa, synthetic construct
  REGION 1..11: note = IGF1R2-LCDR1
QGDSLRSYYAT

SEQ ID NO: 2022 - protein, 7 aa, synthetic construct
  REGION 1..7: note = IGF1R2-LCDR2
GENKRPS

SEQ ID NO: 2023 - protein, 11 aa, synthetic construct
  REGION 1..11: note = IGF1R2-LCDR3
KSRDGSGQHLV

SEQ ID NO: 2024 - DNA, 324 bp, synthetic construct
  misc_feature 1..324: note = IGF1R2-L
  source 1..324: mol_type = other DNA
agctcggaattgacccaggatcctgctgtatccgtcgctctcggacaaaccgtgcgcataacatgtcaaggggactccctgaggagctactacgccacatggtaccagcaaaaacccggacaagctccaatcctggtgatttatggcgaaaacaagcgtccctcagggatcccagacaggtttagcggaagttcgagcggcaatactgccagtctgacgattaccggagctcaagctgaggatgaagccgactactattgcaaatcacgcgacggaagcggccagcacctggtgtttggtggcgggacaaagctgaccgttttg

SEQ ID NO: 2025 - protein, 253 aa, synthetic construct
  REGION 1..253: note = IGF1R2-HL
EVQLVQSGAEVKKPGSSVKVSCKASGGTFSSYAISWVRQAPGQGLEWMGGIIPIFGTANYAQKFQGRVTITADKSTSTAYMELSSLRSEDTAVYYCARAPLRFLEWSTQDHYYYYYMDVWGKGTTVTVSSGGGGSGGGGSGGGGSSSELTQDPAVSVALGQTVRITCQGDSLRSYYATWYQQKPGQAPILVIYGENKRPSGIPDRFSGSSSGNTASLTITGAQAEDEADYYCKSRDGSGQHLVFGGGTKLTVL

SEQ ID NO: 2026 - DNA, 759 bp, synthetic construct
  misc_feature 1..759: note = IGF1R2-HL
  source 1..759: mol_type = other DNA
gaggtgcaactagtccagagcggagcggaggtgaagaaacctggatccagcgtgaaagtgagctgtaaggctagcggaggcacattctcctcgtatgccattagctgggttagacaagcacctggacaaggactggagtggatgggagggataatcccaatcttcggaactgccaactacgcacagaagttccaaggacgggtcaccatcactgcggataagtccacctcgactgcctacatggagctcagtagcttacggagcgaagacacagccgtatactattgcgcacgagcacccctaagattcctggagtggagcacgcaggatcactattactattactacatggacgtgtggggaaagggaacgactgtcaccgtttcaagcggtggaggtggaagtggtggaggagggagcggtgggggaggatcaagctcggaattgacccaggatcctgctgtatccgtcgctctcggacaaaccgtgcgcataacatgtcaaggggactccctgaggagctactacgccacatggtaccagcaaaaacccggacaagctccaatcctggtgatttatggcgaaaacaagcgtccctcagggatcccagacaggtttagcggaagttcgagcggcaatactgccagtctgacgattaccggagctcaagctgaggatgaagccgactactattgcaaatcacgcgacggaagcggccagcacctggtgtttggtggcgggacaaagctgaccgttttg

SEQ ID NO: 2027 - protein, 508 aa, synthetic construct
  REGION 1..508: note = IGF1R2HLxI2CHL
EVQLVQSGAEVKKPGSSVKVSCKASGGTFSSYAISWVRQAPGQGLEWMGGIIPIFGTANYAQKFQGRVTITADKSTSTAYMELSSLRSEDTAVYYCARAPLRFLEWSTQDHYYYYYMDVWGKGTTVTVSSGGGGSGGGGSGGGGSSSELTQDPAVSVALGQTVRITCQGDSLRSYYATWYQQKPGQAPILVIYGENKRPSGIPDRFSGSSSGNTASLTITGAQAEDEADYYCKSRDGSGQHLVFGGGTKLTVLSGGGGSEVQLVESGGGLVQPGGSLKLSCAASGFTFNKYAMNWVRQAPGKGLEWVARIRSKYNNYATYYADSVKDRFTISRDDSKNTAYLQMNNLKTEDTAVYYCVRHGNFGNSYISYWAYWGQGTLVTVSSGGGGSGGGGSGGGGSQTVVTQEPSLTVSPGGTVTLTCGSSTGAVTSGNYPNWVQQKPGQAPRGLIGGTKFLAPGTPARFSGSLLGGKAALTLSGVQPEDEAEYYCVLWYSNRWVFGGGTKLTVL

SEQ ID NO: 2028 - DNA, 1524 bp, synthetic construct
  misc_feature 1..1524: note = IGF1R2HLxI2CHL
  source 1..1524: mol_type = other DNA
gaggtgcaactagtccagagcggagcggaggtgaagaaacctggatccagcgtgaaagtgagctgtaaggctagcggaggcacattctcctcgtatgccattagctgggttagacaagcacctggacaaggactggagtggatgggagggataatcccaatcttcggaactgccaactacgcacagaagttccaaggacgggtcaccatcactgcggataagtccacctcgactgcctacatggagctcagtagcttacggagcgaagacacagccgtatactattgcgcacgagcacccctaagattcctggagtggagcacgcaggatcactattactattactacatggacgtgtggggaaagggaacgactgtcaccgtttcaagcggtggaggtggaagtggtggaggagggagcggtgggggaggatcaagctcggaattgacccaggatcctgctgtatccgtcgctctcggacaaaccgtgcgcataacatgtcaaggggactccctgaggagctactacgccacatggtaccagcaaaaacccggacaagctccaatcctggtgatttatggcgaaaacaagcgtccctcagggatcccagacaggtttagcggaagttcgagcggcaatactgccagtctgacgattaccggagctcaagctgaggatgaagccgactactattgcaaatcacgcgacggaagcggccagcacctggtgtttggtggcgggacaaagctgaccgttttgtccggaggtggtggatccgaggtgcagctggtcgagtctggaggaggattggtgcagcctggagggtcattgaaactctcatgtgcagcctctggattcaccttcaataagtacgccatgaactgggtccgccaggctccaggaaagggtttggaatgggttgctcgcataagaagtaaatataataattatgcaacatattatgccgattcagtgaaagacaggttcaccatctccagagatgattcaaaaaacactgcctatctacaaatgaacaacttgaagactgaggacactgccgtgtactactgtgtgagacatgggaacttcggtaatagctacatatcctactgggcttactggggccaagggactctggtcaccgtctcctcaggtggtggtggttctggcggcggcggctccggtggtggtggttctcagactgttgtgactcaggaaccttcactcaccgtatcacctggtggaacagtcacactcacttgtggctcctcgactggggctgttacatctggcaactacccaaactgggtccaacaaaaaccaggtcaggcaccccgtggtctaataggtgggactaagttcctcgcccccggtactcctgccagattctcaggctccctgcttggaggcaaggctgccctcaccctctcaggggtacagccagaggatgaggcagaatattactgtgttctatggtacagcaaccgctgggtgttcggtggaggaaccaaactgactgtccta

SEQ ID NO: 2029 - protein, 118 aa, synthetic construct
  REGION 1..118: note = IGF1R7-H
QVELVESGGGVVQPGRSQRLSCAASGFTFSSYGMHWVRQAPGKGLEWVAIIWFDGSSTYYADSVRGRFTISRDNSKNTLYLQMNSLRAEDTAVYFCARELGRRYFDLWGRGTLVSVSS

SEQ ID NO: 2030 - protein, 5 aa, synthetic construct
  REGION 1..5: note = IGF1R7-HCDR1
SYGMH

SEQ ID NO: 2031 - protein, 17 aa, synthetic construct
  REGION 1..17: note = IGF1R7-HCDR2
IIWFDGSSTYYADSVRG

SEQ ID NO: 2032 - protein, 9 aa, synthetic construct
  REGION 1..9: note = IGF1R7-HCDR3
ELGRRYFDL

SEQ ID NO: 2033 - DNA, 354 bp, synthetic construct
  misc_feature 1..354: note = IGF1R7-H
  source 1..354: mol_type = other DNA
caggtcgaattggtggaaagcgggggaggcgtcgttcagcctggtaggagccagaggcttagctgtgctgcctccggtttcaccttctctagctacggaatgcactgggtgagacaggcacccggaaaaggactggaatgggtggccatcatctggttcgacggctcttccacctactatgccgatagcgtgagaggacgcttcaccatctcccgtgacaactccaagaacaccctgtacctccagatgaatagcctgcgagctgaggacactgccgtgtacttttgtgcacgggagctgggacgtaggtactttgatctgtggggaagaggcacactggttagcgttagctcc

SEQ ID NO: 2034 - protein, 108 aa, synthetic construct
  REGION 1..108: note = IGF1R7-L
EIVLTQSPATLSLSPGERATLSCRASQSVSSYLAWYQQKPGQAPRLLIYDASKRAYGIPARFSGSGSGTDFTLTISSLEPEDFAVYYCQQRSKWPPWTFGQGTKVESK

SEQ ID NO: 2035 - protein, 11 aa, synthetic construct
  REGION 1..11: note = IGF1R7-LCDR1
RASQSVSSYLA

SEQ ID NO: 2036 - protein, 7 aa, synthetic construct
  REGION 1..7: note = IGF1R7-LCDR2
DASKRAY

SEQ ID NO: 2037 - protein, 8 aa, synthetic construct
  REGION 1..8: note = IGF1R7-LCDR3
QQRSKWPP

SEQ ID NO: 2038 - DNA, 324 bp, synthetic construct
  misc_feature 1..324: note = IGF1R7-L
  source 1..324: mol_type = other DNA
gaaatcgtgctcacccagagccctgccacattgagcctttcacctggcgagcgagctacattgtcatgccgagctagccagagcgtgagctcttacctggcatggtatcagcagaaacctgggcaggctccacgactgctcatctatgacgcctccaagcgagcctatgggattcctgcaaggtttagcggaagcggaagcggaaccgatttcaccctgactatctcctcactcgagcctgaggactttgccgtgtattactgccagcagcggagcaagtggcctccatggacattcggccagggtaccaaagtggagagcaag

SEQ ID NO: 2039 - protein, 241 aa, synthetic construct
  REGION 1..241: note = IGF1R7-HL
QVELVESGGGVVQPGRSQRLSCAASGFTFSSYGMHWVRQAPGKGLEWVAIIWFDGSSTYYADSVRGRFTISRDNSKNTLYLQMNSLRAEDTAVYFCARELGRRYFDLWGRGTLVSVSSGGGGSGGGGSGGGGSEIVLTQSPATLSLSPGERATLSCRASQSVSSYLAWYQQKPGQAPRLLIYDASKRAYGIPARFSGSGSGTDFTLTISSLEPEDFAVYYCQQRSKWPPWTFGQGTKVESK

SEQ ID NO: 2040 - DNA, 723 bp, synthetic construct
  misc_feature 1..723: note = IGF1R7-HL
  source 1..723: mol_type = other DNA
caggtcgaattggtggaaagcgggggaggcgtcgttcagcctggtaggagccagaggcttagctgtgctgcctccggtttcaccttctctagctacggaatgcactgggtgagacaggcacccggaaaaggactggaatgggtggccatcatctggttcgacggctcttccacctactatgccgatagcgtgagaggacgcttcaccatctcccgtgacaactccaagaacaccctgtacctccagatgaatagcctgcgagctgaggacactgccgtgtacttttgtgcacgggagctgggacgtaggtactttgatctgtggggaagaggcacactggttagcgttagctccggcggagggggaagcggaggcggaggtagcgggggaggtggaagcgaaatcgtgctcacccagagccctgccacattgagcctttcacctggcgagcgagctacattgtcatgccgagctagccagagcgtgagctcttacctggcatggtatcagcagaaacctgggcaggctccacgactgctcatctatgacgcctccaagcgagcctatgggattcctgcaaggtttagcggaagcggaagcggaaccgatttcaccctgactatctcctcactcgagcctgaggactttgccgtgtattactgccagcagcggagcaagtggcctccatggacattcggccagggtaccaaagtggagagcaag

SEQ ID NO: 2041 - protein, 496 aa, synthetic construct
  REGION 1..496: note = IGF1R7HLxI2CHL
QVELVESGGGVVQPGRSQRLSCAASGFTFSSYGMHWVRQAPGKGLEWVAIIWFDGSSTYYADSVRGRFTISRDNSKNTLYLQMNSLRAEDTAVYFCARELGRRYFDLWGRGTLVSVSSGGGGSGGGGSGGGGSEIVLTQSPATLSLSPGERATLSCRASQSVSSYLAWYQQKPGQAPRLLIYDASKRAYGIPARFSGSGSGTDFTLTISSLEPEDFAVYYCQQRSKWPPWTFGQGTKVESKSGGGGSEVQLVESGGGLVQPGGSLKLSCAASGFTFNKYAMNWVRQAPGKGLEWVARIRSKYNNYATYYADSVKDRFTISRDDSKNTAYLQMNNLKTEDTAVYYCVRHGNFGNSYISYWAYWGQGTLVTVSSGGGGSGGGGSGGGGSQTVVTQEPSLTVSPGGTVTLTCGSSTGAVTSGNYPNWVQQKPGQAPRGLIGGTKFLAPGTPARFSGSLLGGKAALTLSGVQPEDEAEYYCVLWYSNRWVFGGGTKLTVL

SEQ ID NO: 2042 - DNA, 1488 bp, synthetic construct
  misc_feature 1..1488: note = IGF1R7HLxI2CHL
  source 1..1488: mol_type = other DNA
caggtcgaattggtggaaagcgggggaggcgtcgttcagcctggtaggagccagaggcttagctgtgctgcctccggtttcaccttctctagctacggaatgcactgggtgagacaggcacccggaaaaggactggaatgggtggccatcatctggttcgacggctcttccacctactatgccgatagcgtgagaggacgcttcaccatctcccgtgacaactccaagaacaccctgtacctccagatgaatagcctgcgagctgaggacactgccgtgtacttttgtgcacgggagctgggacgtaggtactttgatctgtggggaagaggcacactggttagcgttagctccggcggagggggaagcggaggcggaggtagcgggggaggtggaagcgaaatcgtgctcacccagagccctgccacattgagcctttcacctggcgagcgagctacattgtcatgccgagctagccagagcgtgagctcttacctggcatggtatcagcagaaacctgggcaggctccacgactgctcatctatgacgcctccaagcgagcctatgggattcctgcaaggtttagcggaagcggaagcggaaccgatttcaccctgactatctcctcactcgagcctgaggactttgccgtgtattactgccagcagcggagcaagtggcctccatggacattcggccagggtaccaaagtggagagcaagtccggaggtggtggatccgaggtgcagctggtcgagtctggaggaggattggtgcagcctggagggtcattgaaactctcatgtgcagcctctggattcaccttcaataagtacgccatgaactgggtccgccaggctccaggaaagggtttggaatgggttgctcgcataagaagtaaatataataattatgcaacatattatgccgattcagtgaaagacaggttcaccatctccagagatgattcaaaaaacactgcctatctacaaatgaacaacttgaagactgaggacactgccgtgtactactgtgtgagacatgggaacttcggtaatagctacatatcctactgggcttactggggccaagggactctggtcaccgtctcctcaggtggtggtggttctggcggcggcggctccggtggtggtggttctcagactgttgtgactcaggaaccttcactcaccgtatcacctggtggaacagtcacactcacttgtggctcctcgactggggctgttacatctggcaactacccaaactgggtccaacaaaaaccaggtcaggcaccccgtggtctaataggtgggactaagttcctcgcccccggtactcctgccagattctcaggctccctgcttggaggcaaggctgccctcaccctctcaggggtacagccagaggatgaggcagaatattactgtgttctatggtacagcaaccgctgggtgttcggtggaggaaccaaactgactgtccta

SEQ ID NO: 2043 - protein, 120 aa, synthetic construct
  REGION 1..120: note = IGF1R9-H
EVQLLESGGGLVQPGGSLRLSCAASGFTFSIYRMQWVRQAPGKGLEWVSGISPSGGTTWYADSVKGRFTISRDNSKNTLYLQMNSLRAEDTAVYYCARWSGGSGYAFDIWGQGTMVTVSS

SEQ ID NO: 2044 - protein, 5 aa, synthetic construct
  REGION 1..5: note = IGF1R9-HCDR1
IYRMQ

SEQ ID NO: 2045 - protein, 17 aa, synthetic construct
  REGION 1..17: note = IGF1R9-HCDR2
GISPSGGTTWYADSVKG

SEQ ID NO: 2046 - protein, 11 aa, synthetic construct
  REGION 1..11: note = IGF1R9-HCDR3
WSGGSGYAFDI

SEQ ID NO: 2047 - DNA, 360 bp, synthetic construct
  misc_feature 1..360: note = IGF1R9-H
  source 1..360: mol_type = other DNA
gaagttcagctgctcgagagcggaggtggacttgtgcagcctgggggatcactgagattgtcatgcgcagctagcggctttaccttctccatctatcgcatgcagtgggttcgacaggcacccggaaagggattggaatgggtctccggcattagccctagcgggggaacaacctggtatgccgatagcgtgaagggcaggttcaccatctctagggacaacagcaaaaatactctgtacctgcagatgaactccctgcgtgccgaggatactgccgtctactactgtgctcgatggtccggtggctccggctatgccttcgatatctggggacagggtacaatggtgactgtgagtagc

SEQ ID NO: 2048 - protein, 107 aa, synthetic construct
  REGION 1..107: note = IGF1R9-L
DIQMTQSPLSLSASVGDRVTITCQASRDIRNYLNWYQQKPGKAPKLLIYDASSLQTGVPSRFGGSGSGTDFSFTIGSLQPEDIATYYCQQFDSLPHTFGQGTKLEIK

SEQ ID NO: 2049 - protein, 11 aa, synthetic construct
  REGION 1..11: note = IGF1R9-LCDR1
QASRDIRNYLN

SEQ ID NO: 2050 - protein, 7 aa, synthetic construct
  REGION 1..7: note = IGF1R9-LCDR2
DASSLQT

SEQ ID NO: 2051 - protein, 9 aa, synthetic construct
  REGION 1..9: note = IGF1R9-LCDR3
QQFDSLPHT

SEQ ID NO: 2052 - DNA, 321 bp, synthetic construct
  misc_feature 1..321: note = IGF1R9-L
  source 1..321: mol_type = other DNA
gacattcagatgacccagagcccattgtcactgtcagcttccgtgggcgatcgggtgaccattacatgccaggcttcacgcgacatcaggaactacctgaactggtatcagcagaagcctggcaaagcccccaagctccttatctacgacgcaagctcactgcagactggtgttccctcaagattcggtggaagcgggagtggcaccgactttagctttaccatcggctctctgcagcctgaggacatcgccacatattactgccagcagtttgactccctgccacacacatttggccagggcaccaaactggagatcaag

SEQ ID NO: 2053 - protein, 242 aa, synthetic construct
  REGION 1..242: note = IGF1R9-HL
EVQLLESGGGLVQPGGSLRLSCAASGFTFSIYRMQWVRQAPGKGLEWVSGISPSGGTTWYADSVKGRFTISRDNSKNTLYLQMNSLRAEDTAVYYCARWSGGSGYAFDIWGQGTMVTVSSGGGGSGGGGSGGGGSDIQMTQSPLSLSASVGDRVTITCQASRDIRNYLNWYQQKPGKAPKLLIYDASSLQTGVPSRFGGSGSGTDFSFTIGSLQPEDIATYYCQQFDSLPHTFGQGTKLEIK

SEQ ID NO: 2054 - DNA, 726 bp, synthetic construct
  misc_feature 1..726: note = IGF1R9-HL
  source 1..726: mol_type = other DNA
gaagttcagctgctcgagagcggaggtggacttgtgcagcctgggggatcactgagattgtcatgcgcagctagcggctttaccttctccatctatcgcatgcagtgggttcgacaggcacccggaaagggattggaatgggtctccggcattagccctagcgggggaacaacctggtatgccgatagcgtgaagggcaggttcaccatctctagggacaacagcaaaaatactctgtacctgcagatgaactccctgcgtgccgaggatactgccgtctactactgtgctcgatggtccggtggctccggctatgccttcgatatctggggacagggtacaatggtgactgtgagtagcggagggggaggtagcggaggaggtggaagtggcggaggtggaagcgacattcagatgacccagagcccattgtcactgtcagcttccgtgggcgatcgggtgaccattacatgccaggcttcacgcgacatcaggaactacctgaactggtatcagcagaagcctggcaaagcccccaagctccttatctacgacgcaagctcactgcagactggtgttccctcaagattcggtggaagcgggagtggcaccgactttagctttaccatcggctctctgcagcctgaggacatcgccacatattactgccagcagtttgactccctgccacacacatttggccagggcaccaaactggagatcaag

SEQ ID NO: 2055 - protein, 497 aa, synthetic construct
  REGION 1..497: note = IGF1R9HLxI2CHL
EVQLLESGGGLVQPGGSLRLSCAASGFTFSIYRMQWVRQAPGKGLEWVSGISPSGGTTWYADSVKGRFTISRDNSKNTLYLQMNSLRAEDTAVYYCARWSGGSGYAFDIWGQGTMVTVSSGGGGSGGGGSGGGGSDIQMTQSPLSLSASVGDRVTITCQASRDIRNYLNWYQQKPGKAPKLLIYDASSLQTGVPSRFGGSGSGTDFSFTIGSLQPEDIATYYCQQFDSLPHTFGQGTKLEIKSGGGGSEVQLVESGGGLVQPGGSLKLSCAASGFTFNKYAMNWVRQAPGKGLEWVARIRSKYNNYATYYADSVKDRFTISRDDSKNTAYLQMNNLKTEDTAVYYCVRHGNFGNSYISYWAYWGQGTLVTVSSGGGGSGGGGSGGGGSQTVVTQEPSLTVSPGGTVTLTCGSSTGAVTSGNYPNWVQQKPGQAPRGLIGGTKFLAPGTPARFSGSLLGGKAALTLSGVQPEDEAEYYCVLWYSNRWVFGGGTKLTVL

SEQ ID NO: 2056 - DNA, 1491 bp, synthetic construct
  misc_feature 1..1491: note = IGF1R9HLxI2CHL
  source 1..1491: mol_type = other DNA
gaagttcagctgctcgagagcggaggtggacttgtgcagcctgggggatcactgagattgtcatgcgcagctagcggctttaccttctccatctatcgcatgcagtgggttcgacaggcacccggaaagggattggaatgggtctccggcattagccctagcgggggaacaacctggtatgccgatagcgtgaagggcaggttcaccatctctagggacaacagcaaaaatactctgtacctgcagatgaactccctgcgtgccgaggatactgccgtctactactgtgctcgatggtccggtggctccggctatgccttcgatatctggggacagggtacaatggtgactgtgagtagcggagggggaggtagcggaggaggtggaagtggcggaggtggaagcgacattcagatgacccagagcccattgtcactgtcagcttccgtgggcgatcgggtgaccattacatgccaggcttcacgcgacatcaggaactacctgaactggtatcagcagaagcctggcaaagcccccaagctccttatctacgacgcaagctcactgcagactggtgttccctcaagattcggtggaagcgggagtggcaccgactttagctttaccatcggctctctgcagcctgaggacatcgccacatattactgccagcagtttgactccctgccacacacatttggccagggcaccaaactggagatcaagtccggaggtggtggatccgaggtgcagctggtcgagtctggaggaggattggtgcagcctggagggtcattgaaactctcatgtgcagcctctggattcaccttcaataagtacgccatgaactgggtccgccaggctccaggaaagggtttggaatgggttgctcgcataagaagtaaatataataattatgcaacatattatgccgattcagtgaaagacaggttcaccatctccagagatgattcaaaaaacactgcctatctacaaatgaacaacttgaagactgaggacactgccgtgtactactgtgtgagacatgggaacttcggtaatagctacatatcctactgggcttactggggccaagggactctggtcaccgtctcctcaggtggtggtggttctggcggcggcggctccggtggtggtggttctcagactgttgtgactcaggaaccttcactcaccgtatcacctggtggaacagtcacactcacttgtggctcctcgactggggctgttacatctggcaactacccaaactgggtccaacaaaaaccaggtcaggcaccccgtggtctaataggtgggactaagttcctcgcccccggtactcctgccagattctcaggctccctgcttggaggcaaggctgccctcaccctctcaggggtacagccagaggatgaggcagaatattactgtgttctatggtacagcaaccgctgggtgttcggtggaggaaccaaactgactgtccta

SEQ ID NO: 2057 - protein, 121 aa, synthetic construct
  REGION 1..121: note = IGF1R10-H
EVQLLESGGGLVQPGGSLRLSCAASGFTFSNYHMAWVRQAPGKGLEWVSVISPTGGRTTYADSVKGRFTISRDNSKNTLYLQMNSLRAEDTATYYCARAGYSYGYGYFDYWGQGTLVTVSS

SEQ ID NO: 2058 - protein, 5 aa, synthetic construct
  REGION 1..5: note = IGF1R10-HCDR1
NYHMA

SEQ ID NO: 2059 - protein, 17 aa, synthetic construct
  REGION 1..17: note = IGF1R10-HCDR2
VISPTGGRTTYADSVKG

SEQ ID NO: 2060 - protein, 12 aa, synthetic construct
  REGION 1..12: note = IGF1R10-HCDR2
AGYSYGYGYFDY

SEQ ID NO: 2061 - DNA, 363 bp, synthetic construct
  misc_feature 1..363: note = IGF1R10-H
  source 1..363: mol_type = other DNA
gaagtgcagctcttggagagcggagggggacttgtgcagcctggcggatccttgagactttcttgcgctgcctccggtttcaccttctcaaattaccacatggcctgggtgagacaggctcctggaaaagggctcgaatgggtttccgtgattagcccaaccggagggaggaccacatatgccgatagcgtcaaggggaggtttacaatcagccgtgacaactccaagaacaccctgtacctccagatgaactcactgcgagccgaggatactgcaacctactactgcgctcgagccggatactcatacggctatggctacttcgactactggggacagggaacactggtgaccgttagtagc

SEQ ID NO: 2062 - protein, 108 aa, synthetic construct
  REGION 1..108: note = IGF1R10-L
DIQMTQFPATLSVSPGERATLSCRASQSVMRNLAWYQQKPGQPPRLLIYGASKRATGIPARFSGSGSGTAFTLTISNLEPEDFAVYYCHQRSTWPLGTFGPGTKLEAK

SEQ ID NO: 2063 - protein, 11 aa, synthetic construct
  REGION 1..11: note = IGF1R10-LCDR1
RASQSVMRNLA

SEQ ID NO: 2064 - protein, 7 aa, synthetic construct
  REGION 1..7: note = IGF1R10-LCDR2
GASKRAT

SEQ ID NO: 2065 - protein, 10 aa, synthetic construct
  REGION 1..10: note = IGF1R10-LCDR3
HQRSTWPLGT

SEQ ID NO: 2066 - DNA, 324 bp, synthetic construct
  misc_feature 1..324: note = IGF1R10-L
  source 1..324: mol_type = other DNA
gatattcagatgacccagttccctgcaaccttgagcgtgtcacctggcgaaagagccacactgtcttgccgagcaagccagagcgtgatgcggaacctggcatggtaccagcagaaacctggccagcctccacgactgctgatctatggagctagcaaaagagccaccggaatccccgctaggtttagcggaagcggaagcggaactgcctttaccctgaccatctccaatctcgagcctgaggactttgccgtctactactgtcaccagcgtagcacttggcctctggggacatttggacctggcacaaagctggaagctaag

SEQ ID NO: 2067 - protein, 244 aa, synthetic construct
  REGION 1..244: note = IGF1R10-HL
EVQLLESGGGLVQPGGSLRLSCAASGFTFSNYHMAWVRQAPGKGLEWVSVISPTGGRTTYADSVKGRFTISRDNSKNTLYLQMNSLRAEDTATYYCARAGYSYGYGYFDYWGQGTLVTVSSGGGGSGGGGSGGGGSDIQMTQFPATLSVSPGERATLSCRASQSVMRNLAWYQQKPGQPPRLLIYGASKRATGIPARFSGSGSGTAFTLTISNLEPEDFAVYYCHQRSTWPLGTFGPGTKLEAK

SEQ ID NO: 2068 - DNA, 732 bp, synthetic construct
  misc_feature 1..732: note = IGF1R10-HL
  source 1..732: mol_type = other DNA
gaagtgcagctcttggagagcggagggggacttgtgcagcctggcggatccttgagactttcttgcgctgcctccggtttcaccttctcaaattaccacatggcctgggtgagacaggctcctggaaaagggctcgaatgggtttccgtgattagcccaaccggagggaggaccacatatgccgatagcgtcaaggggaggtttacaatcagccgtgacaactccaagaacaccctgtacctccagatgaactcactgcgagccgaggatactgcaacctactactgcgctcgagccggatactcatacggctatggctacttcgactactggggacagggaacactggtgaccgttagtagcggagggggaggttctggcggaggtggaagcgggggcgggggaagcgatattcagatgacccagttccctgcaaccttgagcgtgtcacctggcgaaagagccacactgtcttgccgagcaagccagagcgtgatgcggaacctggcatggtaccagcagaaacctggccagcctccacgactgctgatctatggagctagcaaaagagccaccggaatccccgctaggtttagcggaagcggaagcggaactgcctttaccctgaccatctccaatctcgagcctgaggactttgccgtctactactgtcaccagcgtagcacttggcctctggggacatttggacctggcacaaagctggaagctaag

SEQ ID NO: 2069 - protein, 499 aa, synthetic construct
  REGION 1..499: note = IGF1R10HLxI2CHL
EVQLLESGGGLVQPGGSLRLSCAASGFTFSNYHMAWVRQAPGKGLEWVSVISPTGGRTTYADSVKGRFTISRDNSKNTLYLQMNSLRAEDTATYYCARAGYSYGYGYFDYWGQGTLVTVSSGGGGSGGGGSGGGGSDIQMTQFPATLSVSPGERATLSCRASQSVMRNLAWYQQKPGQPPRLLIYGASKRATGIPARFSGSGSGTAFTLTISNLEPEDFAVYYCHQRSTWPLGTFGPGTKLEAKSGGGGSEVQLVESGGGLVQPGGSLKLSCAASGFTFNKYAMNWVRQAPGKGLEWVARIRSKYNNYATYYADSVKDRFTISRDDSKNTAYLQMNNLKTEDTAVYYCVRHGNFGNSYISYWAYWGQGTLVTVSSGGGGSGGGGSGGGGSQTVVTQEPSLTVSPGGTVTLTCGSSTGAVTSGNYPNWVQQKPGQAPRGLIGGTKFLAPGTPARFSGSLLGGKAALTLSGVQPEDEAEYYCVLWYSNRWVFGGGTKLTVL

SEQ ID NO: 2070 - DNA, 1497 bp, synthetic construct
  misc_feature 1..1497: note = IGF1R10HLxI2CHL
  source 1..1497: mol_type = other DNA
gaagtgcagctcttggagagcggagggggacttgtgcagcctggcggatccttgagactttcttgcgctgcctccggtttcaccttctcaaattaccacatggcctgggtgagacaggctcctggaaaagggctcgaatgggtttccgtgattagcccaaccggagggaggaccacatatgccgatagcgtcaaggggaggtttacaatcagccgtgacaactccaagaacaccctgtacctccagatgaactcactgcgagccgaggatactgcaacctactactgcgctcgagccggatactcatacggctatggctacttcgactactggggacagggaacactggtgaccgttagtagcggagggggaggttctggcggaggtggaagcgggggcgggggaagcgatattcagatgacccagttccctgcaaccttgagcgtgtcacctggcgaaagagccacactgtcttgccgagcaagccagagcgtgatgcggaacctggcatggtaccagcagaaacctggccagcctccacgactgctgatctatggagctagcaaaagagccaccggaatccccgctaggtttagcggaagcggaagcggaactgcctttaccctgaccatctccaatctcgagcctgaggactttgccgtctactactgtcaccagcgtagcacttggcctctggggacatttggacctggcacaaagctggaagctaagtccggaggtggtggatccgaggtgcagctggtcgagtctggaggaggattggtgcagcctggagggtcattgaaactctcatgtgcagcctctggattcaccttcaataagtacgccatgaactgggtccgccaggctccaggaaagggtttggaatgggttgctcgcataagaagtaaatataataattatgcaacatattatgccgattcagtgaaagacaggttcaccatctccagagatgattcaaaaaacactgcctatctacaaatgaacaacttgaagactgaggacactgccgtgtactactgtgtgagacatgggaacttcggtaatagctacatatcctactgggcttactggggccaagggactctggtcaccgtctcctcaggtggtggtggttctggcggcggcggctccggtggtggtggttctcagactgttgtgactcaggaaccttcactcaccgtatcacctggtggaacagtcacactcacttgtggctcctcgactggggctgttacatctggcaactacccaaactgggtccaacaaaaaccaggtcaggcaccccgtggtctaataggtgggactaagttcctcgcccccggtactcctgccagattctcaggctccctgcttggaggcaaggctgccctcaccctctcaggggtacagccagaggatgaggcagaatattactgtgttctatggtacagcaaccgctgggtgttcggtggaggaaccaaactgactgtccta

SEQ ID NO: 2071 - protein, 119 aa, synthetic construct
  REGION 1..119: note = IGF1R11-H
EVQLLESGGGLVQPGGSLRLSCAASGFTFSKYMMSWVRQAPGKGLEWVSYISPSGGLTWYADSVKGRFTISRDNSKNTLYLQMNSLREADTAVYYCARDGARGYGMDVWGQGTTVTVSS

SEQ ID NO: 2072 - protein, 5 aa, synthetic construct
  REGION 1..5: note = IGF1R11-HCDR1
KYMMS

SEQ ID NO: 2073 - protein, 17 aa, synthetic construct
  REGION 1..17: note = IGF1R11-HCDR2
YISPSGGLTWYADSVKG

SEQ ID NO: 2074 - protein, 10 aa, synthetic construct
  REGION 1..10: note = IGF1R11-HCDR3
DGARGYGMDV

SEQ ID NO: 2075 - DNA, 357 bp, synthetic construct
  misc_feature 1..357: note = IGF1R11-H
  source 1..357: mol_type = other DNA
gaggtccagctgttggaaagcggaggcggactcgtgcagcctggcggatctttgcgactttcctgtgctgcctccggtttcaccttctccaagtacatgatgagctgggtgagacaggcaccaggcaaaggactggaatgggtgagctacattagcccatctggcggactgacatggtatgccgatagtgttaaggggaggttcaccatcagtagggacaatagcaagaacaccctgtacctgcagatgaactcactgcgagaggctgatactgccgtgtattactgcgcaagggatggagctagaggctatggaatggacgtgtggggacagggaacaaccgtcaccgtgagcagt

SEQ ID NO: 2076 - protein, 109 aa, synthetic construct
  REGION 1..109: note = IGF1R11-L
DIQMTQSPATLSLSPGERATLSCRASQSVSSYLAWYQQKPGQAPRLLIYDASNRATGIPARFSGSGSGTDFTLTISSLEPEDFAVYYCQQRSNWPPEVTFGPGTKVDIK

SEQ ID NO: 2077 - protein, 11 aa, synthetic construct
  REGION 1..11: note = IGF1R11-LCDR1
RASQSVSSYLA

SEQ ID NO: 2078 - protein, 7 aa, synthetic construct
  REGION 1..7: note = IGF1R11-LCDR2
DASNRAT

SEQ ID NO: 2079 - protein, 11 aa, synthetic construct
  REGION 1..11: note = IGF1R11-LCDR3
QQRSNWPPEVT

SEQ ID NO: 2080 - protein, 327 aa, synthetic construct
  REGION 1..327: note = IGF1R11-L
GACATTCAGATGACACAGAGCCCTGCCACACTGAGCCTGTCACCTGGAGAGCGAGCTACATTGAGCTGTCGCGCTAGCCAGAGCGTGTCTTCCTATCTTGCCTGGTACCAGCAGAAACCTGGACAGGCACCAAGACTCCTGATCTACGACGCCTCCAACCGTGCAACTGGCATCCCTGCTCGCTTTTCTGGCTCTGGCTCTGGGACCGACTTTACCTTGACCATCTCCTCACTGGAACCCGAGGATTTTGCCGTGTACTATTGCCAGCAGCGGAGCAATTGGCCTCCCGAAGTCACTTTTGGCCCTGGCACCAAAGTGGATATCAAG

SEQ ID NO: 2081 - protein, 243 aa, synthetic construct
  REGION 1..243: note = IGF1R11-HL
EVQLLESGGGLVQPGGSLRLSCAASGFTFSKYMMSWVRQAPGKGLEWVSYISPSGGLTWYADSVKGRFTISRDNSKNTLYLQMNSLREADTAVYYCARDGARGYGMDVWGQGTTVTVSSGGGGSGGGGSGGGGSDIQMTQSPATLSLSPGERATLSCRASQSVSSYLAWYQQKPGQAPRLLIYDASNRATGIPARFSGSGSGTDFTLTISSLEPEDFAVYYCQQRSNWPPEVTFGPGTKVDIK

SEQ ID NO: 2082 - DNA, 729 bp, synthetic construct
  misc_feature 1..729: note = IGF1R11-HL
  source 1..729: mol_type = other DNA
gaggtccagctgttggaaagcggaggcggactcgtgcagcctggcggatctttgcgactttcctgtgctgcctccggtttcaccttctccaagtacatgatgagctgggtgagacaggcaccaggcaaaggactggaatgggtgagctacattagcccatctggcggactgacatggtatgccgatagtgttaaggggaggttcaccatcagtagggacaatagcaagaacaccctgtacctgcagatgaactcactgcgagaggctgatactgccgtgtattactgcgcaagggatggagctagaggctatggaatggacgtgtggggacagggaacaaccgtcaccgtgagcagtgggggaggcggaagcggagggggaggtagtggagggggaggctcagacattcagatgacacagagccctgccacactgagcctgtcacctggagagcgagctacattgagctgtcgcgctagccagagcgtgtcttcctatcttgcctggtaccagcagaaacctggacaggcaccaagactcctgatctacgacgcctccaaccgtgcaactggcatccctgctcgcttttctggctctggctctgggaccgactttaccttgaccatctcctcactggaacccgaggattttgccgtgtactattgccagcagcggagcaattggcctcccgaagtcacttttggccctggcaccaaagtggatatcaag

SEQ ID NO: 2083 - protein, 498 aa, synthetic construct
  REGION 1..498: note = IGF1R11HLxI2CHL
EVQLLESGGGLVQPGGSLRLSCAASGFTFSKYMMSWVRQAPGKGLEWVSYISPSGGLTWYADSVKGRFTISRDNSKNTLYLQMNSLREADTAVYYCARDGARGYGMDVWGQGTTVTVSSGGGGSGGGGSGGGGSDIQMTQSPATLSLSPGERATLSCRASQSVSSYLAWYQQKPGQAPRLLIYDASNRATGIPARFSGSGSGTDFTLTISSLEPEDFAVYYCQQRSNWPPEVTFGPGTKVDIKSGGGGSEVQLVESGGGLVQPGGSLKLSCAASGFTFNKYAMNWVRQAPGKGLEWVARIRSKYNNYATYYADSVKDRFTISRDDSKNTAYLQMNNLKTEDTAVYYCVRHGNFGNSYISYWAYWGQGTLVTVSSGGGGSGGGGSGGGGSQTVVTQEPSLTVSPGGTVTLTCGSSTGAVTSGNYPNWVQQKPGQAPRGLIGGTKFLAPGTPARFSGSLLGGKAALTLSGVQPEDEAEYYCVLWYSNRWVFGGGTKLTVL

SEQ ID NO: 2084 - DNA, 1494 bp, synthetic construct
  misc_feature 1..1494: note = IGF1R11HLxI2CHL
  source 1..1494: mol_type = other DNA
gaggtccagctgttggaaagcggaggcggactcgtgcagcctggcggatctttgcgactttcctgtgctgcctccggtttcaccttctccaagtacatgatgagctgggtgagacaggcaccaggcaaaggactggaatgggtgagctacattagcccatctggcggactgacatggtatgccgatagtgttaaggggaggttcaccatcagtagggacaatagcaagaacaccctgtacctgcagatgaactcactgcgagaggctgatactgccgtgtattactgcgcaagggatggagctagaggctatggaatggacgtgtggggacagggaacaaccgtcaccgtgagcagtgggggaggcggaagcggagggggaggtagtggagggggaggctcagacattcagatgacacagagccctgccacactgagcctgtcacctggagagcgagctacattgagctgtcgcgctagccagagcgtgtcttcctatcttgcctggtaccagcagaaacctggacaggcaccaagactcctgatctacgacgcctccaaccgtgcaactggcatccctgctcgcttttctggctctggctctgggaccgactttaccttgaccatctcctcactggaacccgaggattttgccgtgtactattgccagcagcggagcaattggcctcccgaagtcacttttggccctggcaccaaagtggatatcaagtccggaggtggtggatccgaggtgcagctggtcgagtctggaggaggattggtgcagcctggagggtcattgaaactctcatgtgcagcctctggattcaccttcaataagtacgccatgaactgggtccgccaggctccaggaaagggtttggaatgggttgctcgcataagaagtaaatataataattatgcaacatattatgccgattcagtgaaagacaggttcaccatctccagagatgattcaaaaaacactgcctatctacaaatgaacaacttgaagactgaggacactgccgtgtactactgtgtgagacatgggaacttcggtaatagctacatatcctactgggcttactggggccaagggactctggtcaccgtctcctcaggtggtggtggttctggcggcggcggctccggtggtggtggttctcagactgttgtgactcaggaaccttcactcaccgtatcacctggtggaacagtcacactcacttgtggctcctcgactggggctgttacatctggcaactacccaaactgggtccaacaaaaaccaggtcaggcaccccgtggtctaataggtgggactaagttcctcgcccccggtactcctgccagattctcaggctccctgcttggaggcaaggctgccctcaccctctcaggggtacagccagaggatgaggcagaatattactgtgttctatggtacagcaaccgctgggtgttcggtggaggaaccaaactgactgtccta

SEQ ID NO: 2085 - protein, 124 aa, synthetic construct
  REGION 1..124: note = IGF1R12-H
EVQLLESGGGLVQPGGSLRLSCAASGFTFSNYPMYWVRQAPGKGLEWVSRISSSGGRTVYADSVKGRFTISRDNSKNTLYLQMNSLRAEDTAVYYCARDRWSRSAAEYGLGGYWGQGTLVTVSS

SEQ ID NO: 2086 - protein, 5 aa, synthetic construct
  REGION 1..5: note = IGF1R12-HCDR1
NYPMY

SEQ ID NO: 2087 - protein, 17 aa, synthetic construct
  REGION 1..17: note = IGF1R12-HCDR2
RISSSGGRTVYADSVKG

SEQ ID NO: 2088 - protein, 15 aa, synthetic construct
  REGION 1..15: note = IGF1R12-HCDR3
DRWSRSAAEYGLGGY

SEQ ID NO: 2089 - DNA, 372 bp, synthetic construct
  misc_feature 1..372: note = IGF1R12-H
  source 1..372: mol_type = other DNA
gaagtccagctccttgaaagcggtggcggattggtccagcctggaggctctttgagactctcctgtgccgcatcaggcttcaccttttccaactatcctatgtactgggttcgccaggctcctggaaaaggcttggaatgggtgtcacggattagctctagcgggggaaggactgtctatgccgattccgtgaaagggagattcaccatctctcgggacaatagcaagaacaccctgtatctccagatgaactctcttcgtgccgaagacactgccgtgtattactgcgcacgagaccgatggagccgatcagcagctgaatacggcttgggaggctactggggtcagggaactcttgtgactgtctctagc

SEQ ID NO: 2090 - protein, 112 aa, synthetic construct
  REGION 1..112: note = IGF1R12-L
DIQMTQSPDSLAVSLGERATINCKSSQSVLYSSNNKNYLAWYQQKPGQPPKLLIYLASTRESGVPDRFSGSGSGTDFTLTISSLQAEDVAVYYCQQYYSTWTFGQGTKVEIK

SEQ ID NO: 2091 - protein, 17 aa, synthetic construct
  REGION 1..17: note = IGF1R12-LCDR1
KSSQSVLYSSNNKNYLA

SEQ ID NO: 2092 - protein, 7 aa, synthetic construct
  REGION 1..7: note = IGF1R12-LCDR2
LASTRES

SEQ ID NO: 2093 - protein, 8 aa, synthetic construct
  REGION 1..8: note = IGF1R12-LCDR3
QQYYSTWT

SEQ ID NO: 2094 - DNA, 336 bp, synthetic construct
  misc_feature 1..336: note = IGF1R12-L
  source 1..336: mol_type = other DNA
gatatccagatgactcagagccctgattcactggcagtgtctctcggagaacgtgccacaatcaactgcaagagtagccagtccgtcctttactcctccaacaacaaaaactacctcgcatggtaccagcagaaacctgggcagccacccaaacttctcatctatcttgcttccacacgtgagagtggcgtgcctgaccgttttagcggatccggtagcggaacagatttcactctcacaatctcaagcctgcaggctgaagatgtcgcagtctactattgccagcagtattactcaacctggacattcggacaggggacaaaagtggagatcaaa

SEQ ID NO: 2095 - protein, 251 aa, synthetic construct
  REGION 1..251: note = IGF1R12-HL
EVQLLESGGGLVQPGGSLRLSCAASGFTFSNYPMYWVRQAPGKGLEWVSRISSSGGRTVYADSVKGRFTISRDNSKNTLYLQMNSLRAEDTAVYYCARDRWSRSAAEYGLGGYWGQGTLVTVSSGGGGSGGGGSGGGGSDIQMTQSPDSLAVSLGERATINCKSSQSVLYSSNNKNYLAWYQQKPGQPPKLLIYLASTRESGVPDRFSGSGSGTDFTLTISSLQAEDVAVYYCQQYYSTWTFGQGTKVEIK

SEQ ID NO: 2096 - DNA, 753 bp, synthetic construct
  misc_feature 1..753: note = IGF1R12-HL
  source 1..753: mol_type = other DNA
gaagtccagctccttgaaagcggtggcggattggtccagcctggaggctctttgagactctcctgtgccgcatcaggcttcaccttttccaactatcctatgtactgggttcgccaggctcctggaaaaggcttggaatgggtgtcacggattagctctagcgggggaaggactgtctatgccgattccgtgaaagggagattcaccatctctcgggacaatagcaagaacaccctgtatctccagatgaactctcttcgtgccgaagacactgccgtgtattactgcgcacgagaccgatggagccgatcagcagctgaatacggcttgggaggctactggggtcagggaactcttgtgactgtctctagcggaggcggtggaagcgggggaggcggatctggtggaggcggaagcgatatccagatgactcagagccctgattcactggcagtgtctctcggagaacgtgccacaatcaactgcaagagtagccagtccgtcctttactcctccaacaacaaaaactacctcgcatggtaccagcagaaacctgggcagccacccaaacttctcatctatcttgcttccacacgtgagagtggcgtgcctgaccgttttagcggatccggtagcggaacagatttcactctcacaatctcaagcctgcaggctgaagatgtcgcagtctactattgccagcagtattactcaacctggacattcggacaggggacaaaagtggagatcaaa

SEQ ID NO: 2097 - protein, 506 aa, synthetic construct
  REGION 1..506: note = IGF1R12HLxI2CHL
EVQLLESGGGLVQPGGSLRLSCAASGFTFSNYPMYWVRQAPGKGLEWVSRISSSGGRTVYADSVKGRFTISRDNSKNTLYLQMNSLRAEDTAVYYCARDRWSRSAAEYGLGGYWGQGTLVTVSSGGGGSGGGGSGGGGSDIQMTQSPDSLAVSLGERATINCKSSQSVLYSSNNKNYLAWYQQKPGQPPKLLIYLASTRESGVPDRFSGSGSGTDFTLTISSLQAEDVAVYYCQQYYSTWTFGQGTKVEIKSGGGGSEVQLVESGGGLVQPGGSLKLSCAASGFTFNKYAMNWVRQAPGKGLEWVARIRSKYNNYATYYADSVKDRFTISRDDSKNTAYLQMNNLKTEDTAVYYCVRHGNFGNSYISYWAYWGQGTLVTVSSGGGGSGGGGSGGGGSQTVVTQEPSLTVSPGGTVTLTCGSSTGAVTSGNYPNWVQQKPGQAPRGLIGGTKFLAPGTPARFSGSLLGGKAALTLSGVQPEDEAEYYCVLWYSNRWVFGGGTKLTVL

SEQ ID NO: 2098 - DNA, 1518 bp, synthetic construct
  misc_feature 1..1518: note = IGF1R12HLxI2CHL
  source 1..1518: mol_type = other DNA
gaagtccagctccttgaaagcggtggcggattggtccagcctggaggctctttgagactctcctgtgccgcatcaggcttcaccttttccaactatcctatgtactgggttcgccaggctcctggaaaaggcttggaatgggtgtcacggattagctctagcgggggaaggactgtctatgccgattccgtgaaagggagattcaccatctctcgggacaatagcaagaacaccctgtatctccagatgaactctcttcgtgccgaagacactgccgtgtattactgcgcacgagaccgatggagccgatcagcagctgaatacggcttgggaggctactggggtcagggaactcttgtgactgtctctagcggaggcggtggaagcgggggaggcggatctggtggaggcggaagcgatatccagatgactcagagccctgattcactggcagtgtctctcggagaacgtgccacaatcaactgcaagagtagccagtccgtcctttactcctccaacaacaaaaactacctcgcatggtaccagcagaaacctgggcagccacccaaacttctcatctatcttgcttccacacgtgagagtggcgtgcctgaccgttttagcggatccggtagcggaacagatttcactctcacaatctcaagcctgcaggctgaagatgtcgcagtctactattgccagcagtattactcaacctggacattcggacaggggacaaaagtggagatcaaatccggaggtggtggatccgaggtgcagctggtcgagtctggaggaggattggtgcagcctggagggtcattgaaactctcatgtgcagcctctggattcaccttcaataagtacgccatgaactgggtccgccaggctccaggaaagggtttggaatgggttgctcgcataagaagtaaatataataattatgcaacatattatgccgattcagtgaaagacaggttcaccatctccagagatgattcaaaaaacactgcctatctacaaatgaacaacttgaagactgaggacactgccgtgtactactgtgtgagacatgggaacttcggtaatagctacatatcctactgggcttactggggccaagggactctggtcaccgtctcctcaggtggtggtggttctggcggcggcggctccggtggtggtggttctcagactgttgtgactcaggaaccttcactcaccgtatcacctggtggaacagtcacactcacttgtggctcctcgactggggctgttacatctggcaactacccaaactgggtccaacaaaaaccaggtcaggcaccccgtggtctaataggtgggactaagttcctcgcccccggtactcctgccagattctcaggctccctgcttggaggcaaggctgccctcaccctctcaggggtacagccagaggatgaggcagaatattactgtgttctatggtacagcaaccgctgggtgttcggtggaggaaccaaactgactgtccta

SEQ ID NO: 2099 - protein, 128 aa, synthetic construct
  REGION 1..128: note = IGF1R13-H
EVQLVQSGAEVKKPGESLTISCKGPGYNFFNYWIGWVRQMPGKGLEWMGIIYPTDSDTRYSPSFQGQVTISVDKSISTAYLQWSSLKASDTAMYYCARSIRYCPGGRCYSGYYGMDVWGQGTMVTVSS

SEQ ID NO: 2100 - protein, 5 aa, synthetic construct
  REGION 1..5: note = IGF1R13-HCDR1
NYWIG

SEQ ID NO: 2101 - protein, 17 aa, synthetic construct
  REGION 1..17: note = IGF1R13-HCDR2
IIYPTDSDTRYSPSFQG

SEQ ID NO: 2102 - protein, 19 aa, synthetic construct
  REGION 1..19: note = IGF1R13-HCDR3
SIRYCPGGRCYSGYYGMDV

SEQ ID NO: 2103 - DNA, 384 bp, synthetic construct
  misc_feature 1..384: note = IGF1R13-H
  source 1..384: mol_type = other DNA
gaagtccagttggtgcagagtggtgccgaagtcaaaaagcctggcgagagcctgaccatctcatgtaagggtcctggctacaacttcttcaactactggatcggatgggtgcgacagatgcctggaaaagggctcgaatggatgggcattatctatcccaccgactccgacacacggtattccccatcatttcagggacaggtcaccatctccgttgacaagagcatctccaccgcttatctccagtggagttccctgaaagcctccgacaccgcaatgtattactgcgcacgtagtatccgttactgcccaggaggcagatgctatagcggatattacggcatggacgtttggggacagggaacaatggtgactgtgagctca

SEQ ID NO: 2104 - protein, 108 aa, synthetic construct
  REGION 1..108: note = IGF1R13-L
SSELTQDPAVSVALGQTVRITCQGDSLRSYYASWYQQKPGQAPVLVIYGKNNRPSGIPDRFSGSSSGNTASLTITGAQAEDEADYYCNSRDSSGNHVVFGGGTKLTVL

SEQ ID NO: 2105 - protein, 11 aa, synthetic construct
  REGION 1..11: note = IGF1R13-LCDR1
QGDSLRSYYAS

SEQ ID NO: 2106 - protein, 7 aa, synthetic construct
  REGION 1..7: note = IGF1R13-LCDR2
GKNNRPS

SEQ ID NO: 2107 - protein, 11 aa, synthetic construct
  REGION 1..11: note = IGF1R13-LCDR3
NSRDSSGNHVV

SEQ ID NO: 2108 - DNA, 324 bp, synthetic construct
  misc_feature 1..324: note = IGF1R13-L
  source 1..324: mol_type = other DNA
tcaagcgaactgactcaggatccagctgtttctgtcgccttgggacagactgtgcgcattacatgtcagggtgatagcttgcgtagctactacgcttcatggtaccagcagaagcctggacaggcacctgtcctggtgatctacggcaagaacaataggccaagcggtattcccgatcggttttctggatcctcatccggcaatactgcctctctgacaatcaccggtgctcaggctgaagatgaggctgactactactgcaactcccgagattctagcggaaatcacgtggtcttcggaggtgggacaaaacttaccgtgctc

SEQ ID NO: 2109 - protein, 251 aa, synthetic construct
  REGION 1..251: note = IGF1R13-HL
EVQLVQSGAEVKKPGESLTISCKGPGYNFFNYWIGWVRQMPGKGLEWMGIIYPTDSDTRYSPSFQGQVTISVDKSISTAYLQWSSLKASDTAMYYCARSIRYCPGGRCYSGYYGMDVWGQGTMVTVSSGGGGSGGGGSGGGGSSSELTQDPAVSVALGQTVRITCQGDSLRSYYASWYQQKPGQAPVLVIYGKNNRPSGIPDRFSGSSSGNTASLTITGAQAEDEADYYCNSRDSSGNHVVFGGGTKLTVL

SEQ ID NO: 2110 - DNA, 753 bp, synthetic construct
  misc_feature 1..753: note = IGF1R13-HL
  source 1..753: mol_type = other DNA
gaagtccagttggtgcagagtggtgccgaagtcaaaaagcctggcgagagcctgaccatctcatgtaagggtcctggctacaacttcttcaactactggatcggatgggtgcgacagatgcctggaaaagggctcgaatggatgggcattatctatcccaccgactccgacacacggtattccccatcatttcagggacaggtcaccatctccgttgacaagagcatctccaccgcttatctccagtggagttccctgaaagcctccgacaccgcaatgtattactgcgcacgtagtatccgttactgcccaggaggcagatgctatagcggatattacggcatggacgtttggggacagggaacaatggtgactgtgagctcaggagggggaggctctggtgggggaggttctggaggtggaggctcttcaagcgaactgactcaggatccagctgtttctgtcgccttgggacagactgtgcgcattacatgtcagggtgatagcttgcgtagctactacgcttcatggtaccagcagaagcctggacaggcacctgtcctggtgatctacggcaagaacaataggccaagcggtattcccgatcggttttctggatcctcatccggcaatactgcctctctgacaatcaccggtgctcaggctgaagatgaggctgactactactgcaactcccgagattctagcggaaatcacgtggtcttcggaggtgggacaaaacttaccgtgctc

SEQ ID NO: 2111 - protein, 506 aa, synthetic construct
  REGION 1..506: note = IGF1R13HLxI2CHL
EVQLVQSGAEVKKPGESLTISCKGPGYNFFNYWIGWVRQMPGKGLEWMGIIYPTDSDTRYSPSFQGQVTISVDKSISTAYLQWSSLKASDTAMYYCARSIRYCPGGRCYSGYYGMDVWGQGTMVTVSSGGGGSGGGGSGGGGSSSELTQDPAVSVALGQTVRITCQGDSLRSYYASWYQQKPGQAPVLVIYGKNNRPSGIPDRFSGSSSGNTASLTITGAQAEDEADYYCNSRDSSGNHVVFGGGTKLTVLSGGGGSEVQLVESGGGLVQPGGSLKLSCAASGFTFNKYAMNWVRQAPGKGLEWVARIRSKYNNYATYYADSVKDRFTISRDDSKNTAYLQMNNLKTEDTAVYYCVRHGNFGNSYISYWAYWGQGTLVTVSSGGGGSGGGGSGGGGSQTVVTQEPSLTVSPGGTVTLTCGSSTGAVTSGNYPNWVQQKPGQAPRGLIGGTKFLAPGTPARFSGSLLGGKAALTLSGVQPEDEAEYYCVLWYSNRWVFGGGTKLTVL

SEQ ID NO: 2112 - DNA, 1518 bp, synthetic construct
  misc_feature 1..1518: note = IGF1R13HLxI2CHL
  source 1..1518: mol_type = other DNA
gaagtccagttggtgcagagtggtgccgaagtcaaaaagcctggcgagagcctgaccatctcatgtaagggtcctggctacaacttcttcaactactggatcggatgggtgcgacagatgcctggaaaagggctcgaatggatgggcattatctatcccaccgactccgacacacggtattccccatcatttcagggacaggtcaccatctccgttgacaagagcatctccaccgcttatctccagtggagttccctgaaagcctccgacaccgcaatgtattactgcgcacgtagtatccgttactgcccaggaggcagatgctatagcggatattacggcatggacgtttggggacagggaacaatggtgactgtgagctcaggagggggaggctctggtgggggaggttctggaggtggaggctcttcaagcgaactgactcaggatccagctgtttctgtcgccttgggacagactgtgcgcattacatgtcagggtgatagcttgcgtagctactacgcttcatggtaccagcagaagcctggacaggcacctgtcctggtgatctacggcaagaacaataggccaagcggtattcccgatcggttttctggatcctcatccggcaatactgcctctctgacaatcaccggtgctcaggctgaagatgaggctgactactactgcaactcccgagattctagcggaaatcacgtggtcttcggaggtgggacaaaacttaccgtgctctccggaggtggtggatccgaggtgcagctggtcgagtctggaggaggattggtgcagcctggagggtcattgaaactctcatgtgcagcctctggattcaccttcaataagtacgccatgaactgggtccgccaggctccaggaaagggtttggaatgggttgctcgcataagaagtaaatataataattatgcaacatattatgccgattcagtgaaagacaggttcaccatctccagagatgattcaaaaaacactgcctatctacaaatgaacaacttgaagactgaggacactgccgtgtactactgtgtgagacatgggaacttcggtaatagctacatatcctactgggcttactggggccaagggactctggtcaccgtctcctcaggtggtggtggttctggcggcggcggctccggtggtggtggttctcagactgttgtgactcaggaaccttcactcaccgtatcacctggtggaacagtcacactcacttgtggctcctcgactggggctgttacatctggcaactacccaaactgggtccaacaaaaaccaggtcaggcaccccgtggtctaataggtgggactaagttcctcgcccccggtactcctgccagattctcaggctccctgcttggaggcaaggctgccctcaccctctcaggggtacagccagaggatgaggcagaatattactgtgttctatggtacagcaaccgctgggtgttcggtggaggaaccaaactgactgtccta

SEQ ID NO: 2113 - protein, 121 aa, synthetic construct
  REGION 1..121: note = IGF1R15-H
EVQLLESGGGLVQPGGSLRLSCAASGFTFSSYAMSWVRQAPGKGLEWVSAISGSGGSTYYADSVKGRFTISRDNSKNTLYLQMNSLRAEDTAVYYCASSPYSSRWYSFDPWGQGTMVTVSS

SEQ ID NO: 2114 - protein, 5 aa, synthetic construct
  REGION 1..5: note = IGF1R15-HCDR1
SYAMS

SEQ ID NO: 2115 - protein, 17 aa, synthetic construct
  REGION 1..17: note = IGF1R15-HCDR2
AISGSGGSTYYADSVKG

SEQ ID NO: 2116 - protein, 12 aa, synthetic construct
  REGION 1..12: note = IGF1R15-HCDR3
SPYSSRWYSFDP

SEQ ID NO: 2117 - DNA, 363 bp, synthetic construct
  misc_feature 1..363: note = IGF1R15-H
  source 1..363: mol_type = other DNA
gaggttcagctgctcgaaagcggaggcggtttggtgcagcctgggggaagcctgagacttagctgtgctgcaagcggattcaccttctccagctatgccatgagctgggtgaggcaggcccctggcaaaggactggagtgggtgagcgctatctcaggaagcggcggttctacctactacgccgatagcgtcaaggggaggttcaccatcagccgtgacaacagcaagaacaccctgtacctccagatgaatagcctgcgtgctgaggacactgccgtttactactgcgcaagctccccatactcctcacggtggtatagcttcgatccatggggacaggggactatggtgaccgtgagtagt

SEQ ID NO: 2118 - protein, 106 aa, synthetic construct
  REGION 1..106: note = IGF1R15-L
SYELTQPPSVSVSPGQTATITCSGDDLGNKYVSWYQQKPGQSPVLVIYQDTKRPSGIPERFSGSNSGNIATLTISGTQAVDEADYYCQVWDTGTVVFGGGTKLTVL

SEQ ID NO: 2119 - protein, 11 aa, synthetic construct
  REGION 1..11: note = IGF1R15-LCDR1
SGDDLGNKYVS

SEQ ID NO: 2120 - protein, 7 aa, synthetic construct
  REGION 1..7: note = IGF1R15-LCDR2
QDTKRPS

SEQ ID NO: 2121 - protein, 9 aa, synthetic construct
  REGION 1..9: note = IGF1R15-LCDR3
QVWDTGTVV

SEQ ID NO: 2122 - DNA, 318 bp, synthetic construct
  misc_feature 1..318: note = IGF1R15-L
  source 1..318: mol_type = other DNA
agctatgaactgacacagccacctagcgtgagcgttagccctggacagactgccacaatcacctgtagtggggatgaccttggcaacaagtacgtgagctggtatcagcagaagcctggccagtctcccgtgctggtgatctaccaggacaccaaacgacctagcggaatcccagagcgattcagcggaagcaacagcgggaacatcgcaactctcaccatttccggcactcaggccgtggatgaagccgactactattgccaggtgtgggacactggaaccgtcgtgtttgggggaggcacaaaactgaccgtcctg

SEQ ID NO: 2123 - protein, 242 aa, synthetic construct
  REGION 1..242: note = IGF1R15-HL
EVQLLESGGGLVQPGGSLRLSCAASGFTFSSYAMSWVRQAPGKGLEWVSAISGSGGSTYYADSVKGRFTISRDNSKNTLYLQMNSLRAEDTAVYYCASSPYSSRWYSFDPWGQGTMVTVSSGGGGSGGGGSGGGGSSYELTQPPSVSVSPGQTATITCSGDDLGNKYVSWYQQKPGQSPVLVIYQDTKRPSGIPERFSGSNSGNIATLTISGTQAVDEADYYCQVWDTGTVVFGGGTKLTVL

SEQ ID NO: 2124 - DNA, 726 bp, synthetic construct
  misc_feature 1..726: note = IGF1R15-HL
  source 1..726: mol_type = other DNA
gaggttcagctgctcgaaagcggaggcggtttggtgcagcctgggggaagcctgagacttagctgtgctgcaagcggattcaccttctccagctatgccatgagctgggtgaggcaggcccctggcaaaggactggagtgggtgagcgctatctcaggaagcggcggttctacctactacgccgatagcgtcaaggggaggttcaccatcagccgtgacaacagcaagaacaccctgtacctccagatgaatagcctgcgtgctgaggacactgccgtttactactgcgcaagctccccatactcctcacggtggtatagcttcgatccatggggacaggggactatggtgaccgtgagtagtggcggagggggaagcggaggaggcgggagcggcggaggcggaagcagctatgaactgacacagccacctagcgtgagcgttagccctggacagactgccacaatcacctgtagtggggatgaccttggcaacaagtacgtgagctggtatcagcagaagcctggccagtctcccgtgctggtgatctaccaggacaccaaacgacctagcggaatcccagagcgattcagcggaagcaacagcgggaacatcgcaactctcaccatttccggcactcaggccgtggatgaagccgactactattgccaggtgtgggacactggaaccgtcgtgtttgggggaggcacaaaactgaccgtcctg

SEQ ID NO: 2125 - protein, 497 aa, synthetic construct
  REGION 1..497: note = IGF1R15HLxI2CHL
EVQLLESGGGLVQPGGSLRLSCAASGFTFSSYAMSWVRQAPGKGLEWVSAISGSGGSTYYADSVKGRFTISRDNSKNTLYLQMNSLRAEDTAVYYCASSPYSSRWYSFDPWGQGTMVTVSSGGGGSGGGGSGGGGSSYELTQPPSVSVSPGQTATITCSGDDLGNKYVSWYQQKPGQSPVLVIYQDTKRPSGIPERFSGSNSGNIATLTISGTQAVDEADYYCQVWDTGTVVFGGGTKLTVLSGGGGSEVQLVESGGGLVQPGGSLKLSCAASGFTFNKYAMNWVRQAPGKGLEWVARIRSKYNNYATYYADSVKDRFTISRDDSKNTAYLQMNNLKTEDTAVYYCVRHGNFGNSYISYWAYWGQGTLVTVSSGGGGSGGGGSGGGGSQTVVTQEPSLTVSPGGTVTLTCGSSTGAVTSGNYPNWVQQKPGQAPRGLIGGTKFLAPGTPARFSGSLLGGKAALTLSGVQPEDEAEYYCVLWYSNRWVFGGGTKLTVL

SEQ ID NO: 2126 - DNA, 1491 bp, synthetic construct
  misc_feature 1..1491: note = IGF1R15HLxI2CHL
  source 1..1491: mol_type = other DNA
gaggttcagctgctcgaaagcggaggcggtttggtgcagcctgggggaagcctgagacttagctgtgctgcaagcggattcaccttctccagctatgccatgagctgggtgaggcaggcccctggcaaaggactggagtgggtgagcgctatctcaggaagcggcggttctacctactacgccgatagcgtcaaggggaggttcaccatcagccgtgacaacagcaagaacaccctgtacctccagatgaatagcctgcgtgctgaggacactgccgtttactactgcgcaagctccccatactcctcacggtggtatagcttcgatccatggggacaggggactatggtgaccgtgagtagtggcggagggggaagcggaggaggcgggagcggcggaggcggaagcagctatgaactgacacagccacctagcgtgagcgttagccctggacagactgccacaatcacctgtagtggggatgaccttggcaacaagtacgtgagctggtatcagcagaagcctggccagtctcccgtgctggtgatctaccaggacaccaaacgacctagcggaatcccagagcgattcagcggaagcaacagcgggaacatcgcaactctcaccatttccggcactcaggccgtggatgaagccgactactattgccaggtgtgggacactggaaccgtcgtgtttgggggaggcacaaaactgaccgtcctgtccggaggtggtggatccgaggtgcagctggtcgagtctggaggaggattggtgcagcctggagggtcattgaaactctcatgtgcagcctctggattcaccttcaataagtacgccatgaactgggtccgccaggctccaggaaagggtttggaatgggttgctcgcataagaagtaaatataataattatgcaacatattatgccgattcagtgaaagacaggttcaccatctccagagatgattcaaaaaacactgcctatctacaaatgaacaacttgaagactgaggacactgccgtgtactactgtgtgagacatgggaacttcggtaatagctacatatcctactgggcttactggggccaagggactctggtcaccgtctcctcaggtggtggtggttctggcggcggcggctccggtggtggtggttctcagactgttgtgactcaggaaccttcactcaccgtatcacctggtggaacagtcacactcacttgtggctcctcgactggggctgttacatctggcaactacccaaactgggtccaacaaaaaccaggtcaggcaccccgtggtctaataggtgggactaagttcctcgcccccggtactcctgccagattctcaggctccctgcttggaggcaaggctgccctcaccctctcaggggtacagccagaggatgaggcagaatattactgtgttctatggtacagcaaccgctgggtgttcggtggaggaaccaaactgactgtccta

SEQ ID NO: 2127 - protein, 124 aa, synthetic construct
  REGION 1..124: note = IGF1R16-H
QVQLQQSGAELVKPGASVKLSCKASGYTFTSYWMHWVKQRPGQGLEWIGEINPSNGRTNYNEKFKRKATLTVDKSSSTAYMQLSSLTSEDSAVYYFARGRPDYYGSSKWYFDVWGAGTTVTVSS

SEQ ID NO: 2128 - protein, 5 aa, synthetic construct
  REGION 1..5: note = IGF1R16-HCDR1
SYWMH

SEQ ID NO: 2129 - protein, 17 aa, synthetic construct
  REGION 1..17: note = IGF1R16-HCDR2
EINPSNGRTNYNEKFKR

SEQ ID NO: 2130 - protein, 15 aa, synthetic construct
  REGION 1..15: note = IGF1R16-HCDR3
GRPDYYGSSKWYFDV

SEQ ID NO: 2131 - DNA, 372 bp, synthetic construct
  misc_feature 1..372: note = IGF1R16-H
  source 1..372: mol_type = other DNA
caggttcagctgcagcagagcggagctgagctcgttaaacctggtgcttccgtgaaactgagctgcaaagcctccggctataccttcacaagctactggatgcactgggtcaaacagcgtcctggtcagggtctcgaatggattggggagatcaacccctccaacggccgcaccaattacaatgagaagttcaagcggaaggccacccttaccgtggataagagctcatctaccgcctacatgcagctgtcttcactgacatctgaggactctgccgtgtattactttgcaagagggaggcctgactactacgggtcatccaagtggtactttgacgtctggggagctgggactaccgtgactgtgtctagc

SEQ ID NO: 2132 - protein, 112 aa, synthetic construct
  REGION 1..112: note = IGF1R16-L
DVLMTQTPLSLPVSLGDQASISCRSSQSIVHSNVNTYLEWYLQKPGQSPKLLIYKVSNRFSGVPDRFSGSGSGTDFTLRISRVEAEDLGIYYCFQGSHVPPTFGGGTKLEIK

SEQ ID NO: 2133 - protein, 16 aa, synthetic construct
  REGION 1..16: note = IGF1R16-LCDR1
RSSQSIVHSNVNTYLE

SEQ ID NO: 2134 - protein, 7 aa, synthetic construct
  REGION 1..7: note = IGF1R16-LCDR2
KVSNRFS

SEQ ID NO: 2135 - protein, 9 aa, synthetic construct
  REGION 1..9: note = IGF1R16-LCDR3
FQGSHVPPT

SEQ ID NO: 2136 - DNA, 336 bp, synthetic construct
  misc_feature 1..336: note = IGF1R16-L
  source 1..336: mol_type = other DNA
gatgtcttgatgactcagactccactgtcacttcctgtgtcactgggagatcaggcatccattagctgcaggagtagccagagcatcgtgcactccaacgtcaacacatacctggagtggtacctgcagaaacctggccagagcccaaagctgctcatctacaaggtgagcaatcggttttccggcgttcccgatagattcagcggaagcggaagcggtacagactttaccctgcgcatttctcgagtggaagccgaagacctgggcatctactattgcttccagggttctcatgttcccccaaccttcggtggcggaacaaaactcgaaatcaag

SEQ ID NO: 2137 - protein, 251 aa, synthetic construct
  REGION 1..251: note = IGF1R16-HL
QVQLQQSGAELVKPGASVKLSCKASGYTFTSYWMHWVKQRPGQGLEWIGEINPSNGRTNYNEKFKRKATLTVDKSSSTAYMQLSSLTSEDSAVYYFARGRPDYYGSSKWYFDVWGAGTTVTVSSGGGGSGGGGSGGGGSDVLMTQTPLSLPVSLGDQASISCRSSQSIVHSNVNTYLEWYLQKPGQSPKLLIYKVSNRFSGVPDRFSGSGSGTDFTLRISRVEAEDLGIYYCFQGSHVPPTFGGGTKLEIK

SEQ ID NO: 2138 - DNA, 753 bp, synthetic construct
  misc_feature 1..753: note = IGF1R16-HL
  source 1..753: mol_type = other DNA
caggttcagctgcagcagagcggagctgagctcgttaaacctggtgcttccgtgaaactgagctgcaaagcctccggctataccttcacaagctactggatgcactgggtcaaacagcgtcctggtcagggtctcgaatggattggggagatcaacccctccaacggccgcaccaattacaatgagaagttcaagcggaaggccacccttaccgtggataagagctcatctaccgcctacatgcagctgtcttcactgacatctgaggactctgccgtgtattactttgcaagagggaggcctgactactacgggtcatccaagtggtactttgacgtctggggagctgggactaccgtgactgtgtctagcggaggcggagggagcggagggggaggctccggtggcgggggatctgatgtcttgatgactcagactccactgtcacttcctgtgtcactgggagatcaggcatccattagctgcaggagtagccagagcatcgtgcactccaacgtcaacacatacctggagtggtacctgcagaaacctggccagagcccaaagctgctcatctacaaggtgagcaatcggttttccggcgttcccgatagattcagcggaagcggaagcggtacagactttaccctgcgcatttctcgagtggaagccgaagacctgggcatctactattgcttccagggttctcatgttcccccaaccttcggtggcggaacaaaactcgaaatcaag

SEQ ID NO: 2139 - protein, 506 aa, synthetic construct
  REGION 1..506: note = IGF1R16HLxI2CHL
QVQLQQSGAELVKPGASVKLSCKASGYTFTSYWMHWVKQRPGQGLEWIGEINPSNGRTNYNEKFKRKATLTVDKSSSTAYMQLSSLTSEDSAVYYFARGRPDYYGSSKWYFDVWGAGTTVTVSSGGGGSGGGGSGGGGSDVLMTQTPLSLPVSLGDQASISCRSSQSIVHSNVNTYLEWYLQKPGQSPKLLIYKVSNRFSGVPDRFSGSGSGTDFTLRISRVEAEDLGIYYCFQGSHVPPTFGGGTKLEIKSGGGGSEVQLVESGGGLVQPGGSLKLSCAASGFTFNKYAMNWVRQAPGKGLEWVARIRSKYNNYATYYADSVKDRFTISRDDSKNTAYLQMNNLKTEDTAVYYCVRHGNFGNSYISYWAYWGQGTLVTVSSGGGGSGGGGSGGGGSQTVVTQEPSLTVSPGGTVTLTCGSSTGAVTSGNYPNWVQQKPGQAPRGLIGGTKFLAPGTPARFSGSLLGGKAALTLSGVQPEDEAEYYCVLWYSNRWVFGGGTKLTVL

SEQ ID NO: 2140 - DNA, 1518 bp, synthetic construct
  misc_feature 1..1518: note = IGF1R16HLxI2CHL
  source 1..1518: mol_type = other DNA
caggttcagctgcagcagagcggagctgagctcgttaaacctggtgcttccgtgaaactgagctgcaaagcctccggctataccttcacaagctactggatgcactgggtcaaacagcgtcctggtcagggtctcgaatggattggggagatcaacccctccaacggccgcaccaattacaatgagaagttcaagcggaaggccacccttaccgtggataagagctcatctaccgcctacatgcagctgtcttcactgacatctgaggactctgccgtgtattactttgcaagagggaggcctgactactacgggtcatccaagtggtactttgacgtctggggagctgggactaccgtgactgtgtctagcggaggcggagggagcggagggggaggctccggtggcgggggatctgatgtcttgatgactcagactccactgtcacttcctgtgtcactgggagatcaggcatccattagctgcaggagtagccagagcatcgtgcactccaacgtcaacacatacctggagtggtacctgcagaaacctggccagagcccaaagctgctcatctacaaggtgagcaatcggttttccggcgttcccgatagattcagcggaagcggaagcggtacagactttaccctgcgcatttctcgagtggaagccgaagacctgggcatctactattgcttccagggttctcatgttcccccaaccttcggtggcggaacaaaactcgaaatcaagtccggaggtggtggatccgaggtgcagctggtcgagtctggaggaggattggtgcagcctggagggtcattgaaactctcatgtgcagcctctggattcaccttcaataagtacgccatgaactgggtccgccaggctccaggaaagggtttggaatgggttgctcgcataagaagtaaatataataattatgcaacatattatgccgattcagtgaaagacaggttcaccatctccagagatgattcaaaaaacactgcctatctacaaatgaacaacttgaagactgaggacactgccgtgtactactgtgtgagacatgggaacttcggtaatagctacatatcctactgggcttactggggccaagggactctggtcaccgtctcctcaggtggtggtggttctggcggcggcggctccggtggtggtggttctcagactgttgtgactcaggaaccttcactcaccgtatcacctggtggaacagtcacactcacttgtggctcctcgactggggctgttacatctggcaactacccaaactgggtccaacaaaaaccaggtcaggcaccccgtggtctaataggtgggactaagttcctcgcccccggtactcctgccagattctcaggctccctgcttggaggcaaggctgccctcaccctctcaggggtacagccagaggatgaggcagaatattactgtgttctatggtacagcaaccgctgggtgttcggtggaggaaccaaactgactgtccta

SEQ ID NO: 2141 - protein, 125 aa, synthetic construct
  REGION 1..125: note = IGF1R17-H
QAQLVESGGGLVKPGGSLRLSCAASGFTFSDYYMSWIRQAPGKGLEWVSYISSSGSTRDYADSVKGRFTISRDNAKNSLYLQMNSLRAEDTAVYYCVRDGVETTFYYYYYGMDVWGQGTTVTVSS

SEQ ID NO: 2142 - protein, 5 aa, synthetic construct
  REGION 1..5: note = IGF1R17-HCDR1
DYYMS

SEQ ID NO: 2143 - protein, 17 aa, synthetic construct
  REGION 1..17: note = IGF1R17-HCDR2
YISSSGSTRDYADSVKG

SEQ ID NO: 2144 - protein, 16 aa, synthetic construct
  REGION 1..16: note = IGF1R17-HCDR3
DGVETTFYYYYYGMDV

SEQ ID NO: 2145 - DNA, 375 bp, synthetic construct
  misc_feature 1..375: note = IGF1R17-H
  source 1..375: mol_type = other DNA
caggcacagctggtggaaagtggcggtggcttagttaagcctggtggatccctgcgactttcttgtgctgcctccggctttacgttttccgactactacatgtcctggattagacaagcccctggcaagggcttggaatgggtgagctacataagctcctcgggaagcactagggactatgccgatagcgttaaggggagattcacgataagcagggataacgccaagaactccctgtatctgcagatgaatagtctccgtgctgaggacactgccgtgtactattgcgtgagggatggcgtcgaaacaaccttctactactactactatggcatggacgtttggggacagggaacaactgtaaccgtgagctca

SEQ ID NO: 2146 - protein, 107 aa, synthetic construct
  REGION 1..107: note = IGF1R17-L
DIQMTQSPSSLSASVGDRVTFTCRASQDIRRDLGWYQQKPGKAPKRLIYAASRLQSGVPSRFSGSGSGTEFTLTISSLQPEDFATYYCLQHNNYPRTFGQGTEVEII

SEQ ID NO: 2147 - protein, 11 aa, synthetic construct
  REGION 1..11: note = IGF1R17-LCDR1
RASQDIRRDLG

SEQ ID NO: 2148 - protein, 7 aa, synthetic construct
  REGION 1..7: note = IGF1R17-LCDR2
AASRLQS

SEQ ID NO: 2149 - protein, 9 aa, synthetic construct
  REGION 1..9: note = IGF1R17-LCDR3
LQHNNYPRT

SEQ ID NO: 2150 - DNA, 321 bp, synthetic construct
  misc_feature 1..321: note = IGF1R17-L
  source 1..321: mol_type = other DNA
gatatccagatgacacaaagcccaagctcgctgagcgctagcgtaggcgatcgagtgacattcacctgtagggctagccaggatattagacgggacctagggtggtaccagcagaaacctggcaaagctcccaaacgccttatctatgcggcttcacggctgcaatcgggagtcccctctcgcttttctggaagtgggagcggaaccgagtttacattgacgattagctccctccaacctgaggactttgcaacctattactgcctccagcacaataactatccacggaccttcggacaagggaccgaggtcgagatcatc

SEQ ID NO: 2151 - protein, 247 aa, synthetic construct
  REGION 1..247: note = IGF1R17-HL
QAQLVESGGGLVKPGGSLRLSCAASGFTFSDYYMSWIRQAPGKGLEWVSYISSSGSTRDYADSVKGRFTISRDNAKNSLYLQMNSLRAEDTAVYYCVRDGVETTFYYYYYGMDVWGQGTTVTVSSGGGGSGGGGSGGGGSDIQMTQSPSSLSASVGDRVTFTCRASQDIRRDLGWYQQKPGKAPKRLIYAASRLQSGVPSRFSGSGSGTEFTLTISSLQPEDFATYYCLQHNNYPRTFGQGTEVEII

SEQ ID NO: 2152 - DNA, 741 bp, synthetic construct
  misc_feature 1..741: note = IGF1R17-HL
  source 1..741: mol_type = other DNA
caggcacagctggtggaaagtggcggtggcttagttaagcctggtggatccctgcgactttcttgtgctgcctccggctttacgttttccgactactacatgtcctggattagacaagcccctggcaagggcttggaatgggtgagctacataagctcctcgggaagcactagggactatgccgatagcgttaaggggagattcacgataagcagggataacgccaagaactccctgtatctgcagatgaatagtctccgtgctgaggacactgccgtgtactattgcgtgagggatggcgtcgaaacaaccttctactactactactatggcatggacgtttggggacagggaacaactgtaaccgtgagctcaggaggtggaggtagcggaggtggaggtagtggtggaggtggctcggatatccagatgacacaaagcccaagctcgctgagcgctagcgtaggcgatcgagtgacattcacctgtagggctagccaggatattagacgggacctagggtggtaccagcagaaacctggcaaagctcccaaacgccttatctatgcggcttcacggctgcaatcgggagtcccctctcgcttttctggaagtgggagcggaaccgagtttacattgacgattagctccctccaacctgaggactttgcaacctattactgcctccagcacaataactatccacggaccttcggacaagggaccgaggtcgagatcatc

SEQ ID NO: 2153 - protein, 502 aa, synthetic construct
  REGION 1..502: note = IGF1R17HLxI2CHL
QAQLVESGGGLVKPGGSLRLSCAASGFTFSDYYMSWIRQAPGKGLEWVSYISSSGSTRDYADSVKGRFTISRDNAKNSLYLQMNSLRAEDTAVYYCVRDGVETTFYYYYYGMDVWGQGTTVTVSSGGGGSGGGGSGGGGSDIQMTQSPSSLSASVGDRVTFTCRASQDIRRDLGWYQQKPGKAPKRLIYAASRLQSGVPSRFSGSGSGTEFTLTISSLQPEDFATYYCLQHNNYPRTFGQGTEVEIISGGGGSEVQLVESGGGLVQPGGSLKLSCAASGFTFNKYAMNWVRQAPGKGLEWVARIRSKYNNYATYYADSVKDRFTISRDDSKNTAYLQMNNLKTEDTAVYYCVRHGNFGNSYISYWAYWGQGTLVTVSSGGGGSGGGGSGGGGSQTVVTQEPSLTVSPGGTVTLTCGSSTGAVTSGNYPNWVQQKPGQAPRGLIGGTKFLAPGTPARFSGSLLGGKAALTLSGVQPEDEAEYYCVLWYSNRWVFGGGTKLTVL

SEQ ID NO: 2154 - DNA, 1506 bp, synthetic construct
  misc_feature 1..1506: note = IGF1R17HLxI2CHL
  source 1..1506: mol_type = other DNA
caggcacagctggtggaaagtggcggtggcttagttaagcctggtggatccctgcgactttcttgtgctgcctccggctttacgttttccgactactacatgtcctggattagacaagcccctggcaagggcttggaatgggtgagctacataagctcctcgggaagcactagggactatgccgatagcgttaaggggagattcacgataagcagggataacgccaagaactccctgtatctgcagatgaatagtctccgtgctgaggacactgccgtgtactattgcgtgagggatggcgtcgaaacaaccttctactactactactatggcatggacgtttggggacagggaacaactgtaaccgtgagctcaggaggtggaggtagcggaggtggaggtagtggtggaggtggctcggatatccagatgacacaaagcccaagctcgctgagcgctagcgtaggcgatcgagtgacattcacctgtagggctagccaggatattagacgggacctagggtggtaccagcagaaacctggcaaagctcccaaacgccttatctatgcggcttcacggctgcaatcgggagtcccctctcgcttttctggaagtgggagcggaaccgagtttacattgacgattagctccctccaacctgaggactttgcaacctattactgcctccagcacaataactatccacggaccttcggacaagggaccgaggtcgagatcatctccggaggtggtggatccgaggtgcagctggtcgagtctggaggaggattggtgcagcctggagggtcattgaaactctcatgtgcagcctctggattcaccttcaataagtacgccatgaactgggtccgccaggctccaggaaagggtttggaatgggttgctcgcataagaagtaaatataataattatgcaacatattatgccgattcagtgaaagacaggttcaccatctccagagatgattcaaaaaacactgcctatctacaaatgaacaacttgaagactgaggacactgccgtgtactactgtgtgagacatgggaacttcggtaatagctacatatcctactgggcttactggggccaagggactctggtcaccgtctcctcaggtggtggtggttctggcggcggcggctccggtggtggtggttctcagactgttgtgactcaggaaccttcactcaccgtatcacctggtggaacagtcacactcacttgtggctcctcgactggggctgttacatctggcaactacccaaactgggtccaacaaaaaccaggtcaggcaccccgtggtctaataggtgggactaagttcctcgcccccggtactcctgccagattctcaggctccctgcttggaggcaaggctgccctcaccctctcaggggtacagccagaggatgaggcagaatattactgtgttctatggtacagcaaccgctgggtgttcggtggaggaaccaaactgactgtccta

SEQ ID NO: 2155 - protein, 125 aa, synthetic construct
  REGION 1..125: note = IGF1R19-H
EVQLLESGGGLVQPGGSLRLSCAASGFTFSSYAMSWVRQAPGKGLEWVSAISGSGGITYYADSVKGRFTISRDNSKNTLYLQMNSLRAEDTAVYYCAKDLGYGDFYYYYYGMDVWGQGTTVTVSS

SEQ ID NO: 2156 - protein, 5 aa, synthetic construct
  REGION 1..5: note = IGF1R19-HCDR1
SYAMS

SEQ ID NO: 2157 - protein, 17 aa, synthetic construct
  REGION 1..17: note = IGF1R19-HCDR2
AISGSGGITYYADSVKG

SEQ ID NO: 2158 - protein, 16 aa, synthetic construct
  REGION 1..16: note = IGF1R19-HCDR3
DLGYGDFYYYYYGMDV

SEQ ID NO: 2159 - DNA, 375 bp, synthetic construct
  misc_feature 1..375: note = IGF1R19-H
  source 1..375: mol_type = other DNA
gaggttcagctgcttgaatctggcggaggtttggttcagcctgggggttcacttcgtctgagctgtgctgccagcgggtttacattctcctcatatgccatgtcctgggtgcgacaggcaccaggcaaaggcttggaatgggtgtccgctattagcggaagcggaggcatcacatactacgctgatagcgtcaaggggagattcaccatctcacgggacaattccaagaacaccctgtatctccagatgaactccctgcgtgccgaagatactgccgtgtactattgcgccaaggatcttggctacggggacttctactactactactatgggatggacgtgtggggacagggaacaaccgtgactgtgagctct

SEQ ID NO: 2160 - protein, 107 aa, synthetic construct
  REGION 1..107: note = IGF1R19-L
DIQMTQSPSSLSASVGDRVTITCRASQGIRSDLGWFQQKPGKAPKRLIYAASKLHRGVPSRFSGSGSGTEFTLTISRLQPEDFATYYCLQHNSYPLTFGGGTKVEIK

SEQ ID NO: 2161 - protein, 11 aa, synthetic construct
  REGION 1..11: note = IGF1R19-LCDR1
RASQGIRSDLG

SEQ ID NO: 2162 - protein, 7 aa, synthetic construct
  REGION 1..7: note = IGF1R19-LCDR2
AASKLHR

SEQ ID NO: 2163 - protein, 9 aa, synthetic construct
  REGION 1..9: note = IGF1R19-LCDR3
LQHNSYPLT

SEQ ID NO: 2164 - DNA, 321 bp, synthetic construct
  misc_feature 1..321: note = IGF1R19-L
  source 1..321: mol_type = other DNA
gacattcagatgactcagagcccaagctctctgtctgcttctgtgggagaccgcgttaccatcacctgtagagcaagccagggcattcgatccgatctcggatggtttcagcagaaacctggcaaggcacccaaacggctgatctatgctgccagcaaactgcataggggagtgccctcacgctttagcggatctggtagtggtaccgagttcacactgacaatctcacggctgcagcctgaggatttcgccacctattactgcctccagcacaattcctacccactgacctttggcggtgggactaaggtcgagatcaag

SEQ ID NO: 2165 - protein, 247 aa, synthetic construct
  REGION 1..247: note = IGF1R19-HL
EVQLLESGGGLVQPGGSLRLSCAASGFTFSSYAMSWVRQAPGKGLEWVSAISGSGGITYYADSVKGRFTISRDNSKNTLYLQMNSLRAEDTAVYYCAKDLGYGDFYYYYYGMDVWGQGTTVTVSSGGGGSGGGGSGGGGSDIQMTQSPSSLSASVGDRVTITCRASQGIRSDLGWFQQKPGKAPKRLIYAASKLHRGVPSRFSGSGSGTEFTLTISRLQPEDFATYYCLQHNSYPLTFGGGTKVEIK

SEQ ID NO: 2166 - DNA, 741 bp, synthetic construct
  misc_feature 1..741: note = IGF1R19-HL
  source 1..741: mol_type = other DNA
gaggttcagctgcttgaatctggcggaggtttggttcagcctgggggttcacttcgtctgagctgtgctgccagcgggtttacattctcctcatatgccatgtcctgggtgcgacaggcaccaggcaaaggcttggaatgggtgtccgctattagcggaagcggaggcatcacatactacgctgatagcgtcaaggggagattcaccatctcacgggacaattccaagaacaccctgtatctccagatgaactccctgcgtgccgaagatactgccgtgtactattgcgccaaggatcttggctacggggacttctactactactactatgggatggacgtgtggggacagggaacaaccgtgactgtgagctctggtggcggaggatctggcggaggtggaagcggagggggagggagcgacattcagatgactcagagcccaagctctctgtctgcttctgtgggagaccgcgttaccatcacctgtagagcaagccagggcattcgatccgatctcggatggtttcagcagaaacctggcaaggcacccaaacggctgatctatgctgccagcaaactgcataggggagtgccctcacgctttagcggatctggtagtggtaccgagttcacactgacaatctcacggctgcagcctgaggatttcgccacctattactgcctccagcacaattcctacccactgacctttggcggtgggactaaggtcgagatcaag

SEQ ID NO: 2167 - protein, 502 aa, synthetic construct
  REGION 1..502: note = IGF1R19HLxI2CHL
EVQLLESGGGLVQPGGSLRLSCAASGFTFSSYAMSWVRQAPGKGLEWVSAISGSGGITYYADSVKGRFTISRDNSKNTLYLQMNSLRAEDTAVYYCAKDLGYGDFYYYYYGMDVWGQGTTVTVSSGGGGSGGGGSGGGGSDIQMTQSPSSLSASVGDRVTITCRASQGIRSDLGWFQQKPGKAPKRLIYAASKLHRGVPSRFSGSGSGTEFTLTISRLQPEDFATYYCLQHNSYPLTFGGGTKVEIKSGGGGSEVQLVESGGGLVQPGGSLKLSCAASGFTFNKYAMNWVRQAPGKGLEWVARIRSKYNNYATYYADSVKDRFTISRDDSKNTAYLQMNNLKTEDTAVYYCVRHGNFGNSYISYWAYWGQGTLVTVSSGGGGSGGGGSGGGGSQTVVTQEPSLTVSPGGTVTLTCGSSTGAVTSGNYPNWVQQKPGQAPRGLIGGTKFLAPGTPARFSGSLLGGKAALTLSGVQPEDEAEYYCVLWYSNRWVFGGGTKLTVL

SEQ ID NO: 2168 - DNA, 1506 bp, synthetic construct
  misc_feature 1..1506: note = IGF1R19HLxI2CHL
  source 1..1506: mol_type = other DNA
gaggttcagctgcttgaatctggcggaggtttggttcagcctgggggttcacttcgtctgagctgtgctgccagcgggtttacattctcctcatatgccatgtcctgggtgcgacaggcaccaggcaaaggcttggaatgggtgtccgctattagcggaagcggaggcatcacatactacgctgatagcgtcaaggggagattcaccatctcacgggacaattccaagaacaccctgtatctccagatgaactccctgcgtgccgaagatactgccgtgtactattgcgccaaggatcttggctacggggacttctactactactactatgggatggacgtgtggggacagggaacaaccgtgactgtgagctctggtggcggaggatctggcggaggtggaagcggagggggagggagcgacattcagatgactcagagcccaagctctctgtctgcttctgtgggagaccgcgttaccatcacctgtagagcaagccagggcattcgatccgatctcggatggtttcagcagaaacctggcaaggcacccaaacggctgatctatgctgccagcaaactgcataggggagtgccctcacgctttagcggatctggtagtggtaccgagttcacactgacaatctcacggctgcagcctgaggatttcgccacctattactgcctccagcacaattcctacccactgacctttggcggtgggactaaggtcgagatcaagtccggaggtggtggatccgaggtgcagctggtcgagtctggaggaggattggtgcagcctggagggtcattgaaactctcatgtgcagcctctggattcaccttcaataagtacgccatgaactgggtccgccaggctccaggaaagggtttggaatgggttgctcgcataagaagtaaatataataattatgcaacatattatgccgattcagtgaaagacaggttcaccatctccagagatgattcaaaaaacactgcctatctacaaatgaacaacttgaagactgaggacactgccgtgtactactgtgtgagacatgggaacttcggtaatagctacatatcctactgggcttactggggccaagggactctggtcaccgtctcctcaggtggtggtggttctggcggcggcggctccggtggtggtggttctcagactgttgtgactcaggaaccttcactcaccgtatcacctggtggaacagtcacactcacttgtggctcctcgactggggctgttacatctggcaactacccaaactgggtccaacaaaaaccaggtcaggcaccccgtggtctaataggtgggactaagttcctcgcccccggtactcctgccagattctcaggctccctgcttggaggcaaggctgccctcaccctctcaggggtacagccagaggatgaggcagaatattactgtgttctatggtacagcaaccgctgggtgttcggtggaggaaccaaactgactgtccta

SEQ ID NO: 2169 - protein, 121 aa, synthetic construct
  REGION 1..121: note = IGF1R20-H
QIQLVQSGPELKKPGETVKISCKASGYNLANYGLNWVKQAPGEGLKWMGWINTNTGAPTYAEEFKGRFVFFLETSASTAYLQINNLSDEDTATYFCARSIYYYASRYFNVWGAGTSVTVSS

SEQ ID NO: 2170 - protein, 13 aa, synthetic construct
  REGION 1..13: note = IGF1R20-HCDR1
KASGYNLANYGLN

SEQ ID NO: 2171 - protein, 17 aa, synthetic construct
  REGION 1..17: note = IGF1R20-HCDR2
WINTNTGAPTYAEEFKG

SEQ ID NO: 2172 - protein, 12 aa, synthetic construct
  REGION 1..12: note = IGF1R20-HCDR3
SIYYYASRYFNV

SEQ ID NO: 2173 - DNA, 363 bp, synthetic construct
  misc_feature 1..363: note = IGF1R20-H
  source 1..363: mol_type = other DNA
cagatccagctggtgcagagcggacctgagcttaagaagcctggcgagaccgtcaagatctcatgcaaagctagcggatacaacctggccaactatggcctcaactgggtgaaacaggcccctggagagggcctgaagtggatgggatggatcaacaccaatactggcgccccaacatacgcagaggaatttaaggggaggttcgtgttcttcctggaaacctccgctagtactgcctacctgcagatcaacaacctctccgatgaagataccgccacctacttttgtgcccgctctatctactactacgcatccaggtacttcaatgtctggggagccggaacctccgtgactgttagctct

SEQ ID NO: 2174 - protein, 107 aa, synthetic construct
  REGION 1..107: note = IGF1R20-L
DIQMTQTTSSLSASLGDKVTISCRASQDISNYLNWYQQKPDGTIKLLIYYTSRLHSGIPSRFSGSGSGTDYSLTISNLEQEDIATYFCQQGNTLPWTFGGGTKVEIK

SEQ ID NO: 2175 - protein, 11 aa, synthetic construct
  REGION 1..11: note = IGF1R20-LCDR1
RASQDISNYLN

SEQ ID NO: 2176 - protein, 7 aa, synthetic construct
  REGION 1..7: note = IGF1R20-LCDR2
YTSRLHS

SEQ ID NO: 2177 - protein, 9 aa, synthetic construct
  REGION 1..9: note = IGF1R20-LCDR3
QQGNTLPWT

SEQ ID NO: 2178 - DNA, 321 bp, synthetic construct
  misc_feature 1..321: note = IGF1R20-L
  source 1..321: mol_type = other DNA
gatatccagatgacacagactacatcttccctctccgcttcacttggcgacaaagtcaccatttcatgccgtgcaagccaggacatcagcaactacctcaattggtaccagcagaaacccgacgggacaatcaagctgctgatctactacacaagccgactgcacagcgggattccatcaagattcagcggaagcggaagtgggaccgattacagcttgacaatcagcaatctggagcaggaggacatcgctacttacttttgccagcaggggaataccttgccatggacatttgggggcggtaccaaagtggaaatcaag

SEQ ID NO: 2179 - protein, 243 aa, synthetic construct
  REGION 1..243: note = IGF1R20-HL
QIQLVQSGPELKKPGETVKISCKASGYNLANYGLNWVKQAPGEGLKWMGWINTNTGAPTYAEEFKGRFVFFLETSASTAYLQINNLSDEDTATYFCARSIYYYASRYFNVWGAGTSVTVSSGGGGSGGGGSGGGGSDIQMTQTTSSLSASLGDKVTISCRASQDISNYLNWYQQKPDGTIKLLIYYTSRLHSGIPSRFSGSGSGTDYSLTISNLEQEDIATYFCQQGNTLPWTFGGGTKVEIK

SEQ ID NO: 2180 - DNA, 729 bp, synthetic construct
  misc_feature 1..729: note = IGF1R20-HL
  source 1..729: mol_type = other DNA
cagatccagctggtgcagagcggacctgagcttaagaagcctggcgagaccgtcaagatctcatgcaaagctagcggatacaacctggccaactatggcctcaactgggtgaaacaggcccctggagagggcctgaagtggatgggatggatcaacaccaatactggcgccccaacatacgcagaggaatttaaggggaggttcgtgttcttcctggaaacctccgctagtactgcctacctgcagatcaacaacctctccgatgaagataccgccacctacttttgtgcccgctctatctactactacgcatccaggtacttcaatgtctggggagccggaacctccgtgactgttagctctggaggaggcggtagcggtggcggtggaagtggcggaggtggctctgatatccagatgacacagactacatcttccctctccgcttcacttggcgacaaagtcaccatttcatgccgtgcaagccaggacatcagcaactacctcaattggtaccagcagaaacccgacgggacaatcaagctgctgatctactacacaagccgactgcacagcgggattccatcaagattcagcggaagcggaagtgggaccgattacagcttgacaatcagcaatctggagcaggaggacatcgctacttacttttgccagcaggggaataccttgccatggacatttgggggcggtaccaaagtggaaatcaag

SEQ ID NO: 2181 - protein, 498 aa, synthetic construct
  REGION 1..498: note = IGF1R20HLxI2CHL
QIQLVQSGPELKKPGETVKISCKASGYNLANYGLNWVKQAPGEGLKWMGWINTNTGAPTYAEEFKGRFVFFLETSASTAYLQINNLSDEDTATYFCARSIYYYASRYFNVWGAGTSVTVSSGGGGSGGGGSGGGGSDIQMTQTTSSLSASLGDKVTISCRASQDISNYLNWYQQKPDGTIKLLIYYTSRLHSGIPSRFSGSGSGTDYSLTISNLEQEDIATYFCQQGNTLPWTFGGGTKVEIKSGGGGSEVQLVESGGGLVQPGGSLKLSCAASGFTFNKYAMNWVRQAPGKGLEWVARIRSKYNNYATYYADSVKDRFTISRDDSKNTAYLQMNNLKTEDTAVYYCVRHGNFGNSYISYWAYWGQGTLVTVSSGGGGSGGGGSGGGGSQTVVTQEPSLTVSPGGTVTLTCGSSTGAVTSGNYPNWVQQKPGQAPRGLIGGTKFLAPGTPARFSGSLLGGKAALTLSGVQPEDEAEYYCVLWYSNRWVFGGGTKLTVL

SEQ ID NO: 2182 - DNA, 1494 bp, synthetic construct
  misc_feature 1..1494: note = IGF1R20HLxI2CHL
  source 1..1494: mol_type = other DNA
cagatccagctggtgcagagcggacctgagcttaagaagcctggcgagaccgtcaagatctcatgcaaagctagcggatacaacctggccaactatggcctcaactgggtgaaacaggcccctggagagggcctgaagtggatgggatggatcaacaccaatactggcgccccaacatacgcagaggaatttaaggggaggttcgtgttcttcctggaaacctccgctagtactgcctacctgcagatcaacaacctctccgatgaagataccgccacctacttttgtgcccgctctatctactactacgcatccaggtacttcaatgtctggggagccggaacctccgtgactgttagctctggaggaggcggtagcggtggcggtggaagtggcggaggtggctctgatatccagatgacacagactacatcttccctctccgcttcacttggcgacaaagtcaccatttcatgccgtgcaagccaggacatcagcaactacctcaattggtaccagcagaaacccgacgggacaatcaagctgctgatctactacacaagccgactgcacagcgggattccatcaagattcagcggaagcggaagtgggaccgattacagcttgacaatcagcaatctggagcaggaggacatcgctacttacttttgccagcaggggaataccttgccatggacatttgggggcggtaccaaagtggaaatcaagtccggaggtggtggatccgaggtgcagctggtcgagtctggaggaggattggtgcagcctggagggtcattgaaactctcatgtgcagcctctggattcaccttcaataagtacgccatgaactgggtccgccaggctccaggaaagggtttggaatgggttgctcgcataagaagtaaatataataattatgcaacatattatgccgattcagtgaaagacaggttcaccatctccagagatgattcaaaaaacactgcctatctacaaatgaacaacttgaagactgaggacactgccgtgtactactgtgtgagacatgggaacttcggtaatagctacatatcctactgggcttactggggccaagggactctggtcaccgtctcctcaggtggtggtggttctggcggcggcggctccggtggtggtggttctcagactgttgtgactcaggaaccttcactcaccgtatcacctggtggaacagtcacactcacttgtggctcctcgactggggctgttacatctggcaactacccaaactgggtccaacaaaaaccaggtcaggcaccccgtggtctaataggtgggactaagttcctcgcccccggtactcctgccagattctcaggctccctgcttggaggcaaggctgccctcaccctctcaggggtacagccagaggatgaggcagaatattactgtgttctatggtacagcaaccgctgggtgttcggtggaggaaccaaactgactgtccta

SEQ ID NO: 2183 - protein, 121 aa, synthetic construct
  REGION 1..121: note = IGF1R21-H
QIQLVQSGPELKKPGETVKISCKASGYTLANYGMNWVKQAPGKGFKWMGWINTNTGKPTYSDEFKGRFVFSLETSASTAYLLINNLSNEDTATYFCARSIYYYGSRYFNVWGAGTTVTVSS

SEQ ID NO: 2184 - protein, 13 aa, synthetic construct
  REGION 1..13: note = IGF1R21-HCDR1
KASGYTLANYGMN

SEQ ID NO: 2185 - protein, 17 aa, synthetic construct
  REGION 1..17: note = IGF1R21-HCDR2
WINTNTGKPTYSDEFKG

SEQ ID NO: 2186 - protein, 12 aa, synthetic construct
  REGION 1..12: note = IGF1R21-HCDR3
SIYYYGSRYFNV

SEQ ID NO: 2187 - DNA, 363 bp, synthetic construct
  misc_feature 1..363: note = IGF1R21-H
  source 1..363: mol_type = other DNA
cagatccagcttgtccagagtggtcccgagctgaagaaacctggcgaaaccgtgaaaatcagctgcaaggcaagcggctatacactggccaactatggcatgaattgggtgaagcaggcacctgggaagggtttcaagtggatgggctggatcaacaccaacactggcaaaccaacctattccgacgagttcaaggggcgtttcgtgttttcactggaaacctccgcatcaaccgcttacctcttgatcaacaacctgagcaacgaggacaccgccacatacttctgcgctaggagcatctactactatgggagccgctacttcaatgtgtggggagctgggacaactgttactgtgagctca

SEQ ID NO: 2188 - protein, 107 aa, synthetic construct
  REGION 1..107: note = IGF1R21-L
DIQMTQSTSSLSASLGDRVTISCRASQDINNYLTWYQQKPDGTVKLLIYYTSRLHSGVPSRFSGSGSGTDYSLTITNLEQEDFATYFCQQGNTLPWTFGEGTKVEIK

SEQ ID NO: 2189 - protein, 11 aa, synthetic construct
  REGION 1..11: note = IGF1R21-LCDR1
RASQDINNYLT

SEQ ID NO: 2190 - protein, 7 aa, synthetic construct
  REGION 1..7: note = IGF1R21-LCDR2
YTSRLHS

SEQ ID NO: 2191 - protein, 9 aa, synthetic construct
  REGION 1..9: note = IGF1R21-LCDR3
QQGNTLPWT

SEQ ID NO: 2192 - DNA, 321 bp, synthetic construct
  misc_feature 1..321: note = IGF1R21-L
  source 1..321: mol_type = other DNA
gatatccagatgacacagagcacaagttcattgtccgcctctcttggcgatcgagtgaccattagctgccgagcaagccaggacattaacaactacctgacctggtatcagcagaaacccgacgggactgtgaagctgctgatctattacacctctagactgcacagtggcgttcctagccggtttagcggatccggtagcggaacagattactccctgaccatcaccaatctcgagcaggaagactttgccacctacttttgccagcagggcaatactctcccatggacatttggtgaggggaccaaagtcgagattaag

SEQ ID NO: 2193 - protein, 243 aa, synthetic construct
  REGION 1..243: note = IGF1R21-HL
QIQLVQSGPELKKPGETVKISCKASGYTLANYGMNWVKQAPGKGFKWMGWINTNTGKPTYSDEFKGRFVFSLETSASTAYLLINNLSNEDTATYFCARSIYYYGSRYFNVWGAGTTVTVSSGGGGSGGGGSGGGGSDIQMTQSTSSLSASLGDRVTISCRASQDINNYLTWYQQKPDGTVKLLIYYTSRLHSGVPSRFSGSGSGTDYSLTITNLEQEDFATYFCQQGNTLPWTFGEGTKVEIK

SEQ ID NO: 2194 - DNA, 729 bp, synthetic construct
  misc_feature 1..729: note = IGF1R21-HL
  source 1..729: mol_type = other DNA
cagatccagcttgtccagagtggtcccgagctgaagaaacctggcgaaaccgtgaaaatcagctgcaaggcaagcggctatacactggccaactatggcatgaattgggtgaagcaggcacctgggaagggtttcaagtggatgggctggatcaacaccaacactggcaaaccaacctattccgacgagttcaaggggcgtttcgtgttttcactggaaacctccgcatcaaccgcttacctcttgatcaacaacctgagcaacgaggacaccgccacatacttctgcgctaggagcatctactactatgggagccgctacttcaatgtgtggggagctgggacaactgttactgtgagctcaggagggggaggtagcggaggaggcggtagcggaggcggtggatccgatatccagatgacacagagcacaagttcattgtccgcctctcttggcgatcgagtgaccattagctgccgagcaagccaggacattaacaactacctgacctggtatcagcagaaacccgacgggactgtgaagctgctgatctattacacctctagactgcacagtggcgttcctagccggtttagcggatccggtagcggaacagattactccctgaccatcaccaatctcgagcaggaagactttgccacctacttttgccagcagggcaatactctcccatggacatttggtgaggggaccaaagtcgagattaag

SEQ ID NO: 2195 - protein, 498 aa, synthetic construct
  REGION 1..498: note = IGF1R21HLxI2CHL
QIQLVQSGPELKKPGETVKISCKASGYTLANYGMNWVKQAPGKGFKWMGWINTNTGKPTYSDEFKGRFVFSLETSASTAYLLINNLSNEDTATYFCARSIYYYGSRYFNVWGAGTTVTVSSGGGGSGGGGSGGGGSDIQMTQSTSSLSASLGDRVTISCRASQDINNYLTWYQQKPDGTVKLLIYYTSRLHSGVPSRFSGSGSGTDYSLTITNLEQEDFATYFCQQGNTLPWTFGEGTKVEIKSGGGGSEVQLVESGGGLVQPGGSLKLSCAASGFTFNKYAMNWVRQAPGKGLEWVARIRSKYNNYATYYADSVKDRFTISRDDSKNTAYLQMNNLKTEDTAVYYCVRHGNFGNSYISYWAYWGQGTLVTVSSGGGGSGGGGSGGGGSQTVVTQEPSLTVSPGGTVTLTCGSSTGAVTSGNYPNWVQQKPGQAPRGLIGGTKFLAPGTPARFSGSLLGGKAALTLSGVQPEDEAEYYCVLWYSNRWVFGGGTKLTVL

SEQ ID NO: 2196 - DNA, 1494 bp, synthetic construct
  misc_feature 1..1494: note = IGF1R21HLxI2CHL
  source 1..1494: mol_type = other DNA
cagatccagcttgtccagagtggtcccgagctgaagaaacctggcgaaaccgtgaaaatcagctgcaaggcaagcggctatacactggccaactatggcatgaattgggtgaagcaggcacctgggaagggtttcaagtggatgggctggatcaacaccaacactggcaaaccaacctattccgacgagttcaaggggcgtttcgtgttttcactggaaacctccgcatcaaccgcttacctcttgatcaacaacctgagcaacgaggacaccgccacatacttctgcgctaggagcatctactactatgggagccgctacttcaatgtgtggggagctgggacaactgttactgtgagctcaggagggggaggtagcggaggaggcggtagcggaggcggtggatccgatatccagatgacacagagcacaagttcattgtccgcctctcttggcgatcgagtgaccattagctgccgagcaagccaggacattaacaactacctgacctggtatcagcagaaacccgacgggactgtgaagctgctgatctattacacctctagactgcacagtggcgttcctagccggtttagcggatccggtagcggaacagattactccctgaccatcaccaatctcgagcaggaagactttgccacctacttttgccagcagggcaatactctcccatggacatttggtgaggggaccaaagtcgagattaagtccggaggtggtggatccgaggtgcagctggtcgagtctggaggaggattggtgcagcctggagggtcattgaaactctcatgtgcagcctctggattcaccttcaataagtacgccatgaactgggtccgccaggctccaggaaagggtttggaatgggttgctcgcataagaagtaaatataataattatgcaacatattatgccgattcagtgaaagacaggttcaccatctccagagatgattcaaaaaacactgcctatctacaaatgaacaacttgaagactgaggacactgccgtgtactactgtgtgagacatgggaacttcggtaatagctacatatcctactgggcttactggggccaagggactctggtcaccgtctcctcaggtggtggtggttctggcggcggcggctccggtggtggtggttctcagactgttgtgactcaggaaccttcactcaccgtatcacctggtggaacagtcacactcacttgtggctcctcgactggggctgttacatctggcaactacccaaactgggtccaacaaaaaccaggtcaggcaccccgtggtctaataggtgggactaagttcctcgcccccggtactcctgccagattctcaggctccctgcttggaggcaaggctgccctcaccctctcaggggtacagccagaggatgaggcagaatattactgtgttctatggtacagcaaccgctgggtgttcggtggaggaaccaaactgactgtccta

SEQ ID NO: 2197 - protein, 115 aa, synthetic construct
  REGION 1..115: note = IGF1R23-H
EVQLVESGGGLVQPGGSLRLSCAASGYTFTRFWIHWVRQAPGKGLEWVGEINPSNGRTNYNENFKNRFTISADTSKNTAYLQMNSLRAEDTAVYYCARGGRLDQWGQGTLVTVSS

SEQ ID NO: 2198 - protein, 5 aa, synthetic construct
  REGION 1..5: note = IGF1R23-HCDR1
RFWIH

SEQ ID NO: 2199 - protein, 17 aa, synthetic construct
  REGION 1..17: note = IGF1R23-HCDR2
EINPSNGRTNYNENFKN

SEQ ID NO: 2200 - protein, 6 aa, synthetic construct
  REGION 1..6: note = IGF1R23-HCDR3
GGRLDQ

SEQ ID NO: 2201 - DNA, 345 bp, synthetic construct
  misc_feature 1..345: note = IGF1R23-H
  source 1..345: mol_type = other DNA
gaagtccagcttgttgaaagcggaggcggtctggttcagcctggtggatctctgagactgagctgcgctgcaagcggctacacattcacacgcttttggattcattgggtgaggcaggcccctggaaaaggactcgaatgggtgggcgagatcaatcctagcaacggtcggaccaactacaacgagaacttcaagaaccggttcaccatctctgccgacacctccaagaataccgcatacctgcagatgaatagcctccgagccgaggacactgccgtctattactgtgctaggggaggacgccttgatcagtggggacaggggacacttgtgactgtgtcatcc

SEQ ID NO: 2202 - protein, 107 aa, synthetic construct
  REGION 1..107: note = IGF1R23-L
DIQMTQSPSSLSASVGDRVTITCKASQNLRSKVAWYQQKPGKAPKLLIYSASYRYSGVPSRFSGSGSGTDFTLTISSLQPEDFATYYCQQYSNYPYTFGQGTKVEIK

SEQ ID NO: 2203 - protein, 11 aa, synthetic construct
  REGION 1..11: note = IGF1R23-LCDR1
KASQNLRSKVA

SEQ ID NO: 2204 - protein, 7 aa, synthetic construct
  REGION 1..7: note = IGF1R23-LCDR2
SASYRYS

SEQ ID NO: 2205 - protein, 9 aa, synthetic construct
  REGION 1..9: note = IGF1R23-LCDR3
QQYSNYPYT

SEQ ID NO: 2206 - DNA, 321 bp, synthetic construct
  misc_feature 1..321: note = IGF1R23-L
  source 1..321: mol_type = other DNA
gatattcagatgacccagagcccaagctccttgagcgctagcgttggcgatcgtgtgactatcacctgtaaggctagccagaacctgcgaagcaaggtcgcatggtatcagcagaaacccggcaaagccccaaagctgctgatctactccgcatcctatcggtattccggcgtgccaagcagattcagtgggagtgggagcggaactgactttaccctcaccatctcatccctgcagcctgaggactttgccacctactattgccagcagtattccaactacccctacacctttggccagggcacaaaagtggagatcaag

SEQ ID NO: 2207 - protein, 237 aa, synthetic construct
  REGION 1..237: note = IGF1R23-HL
EVQLVESGGGLVQPGGSLRLSCAASGYTFTRFWIHWVRQAPGKGLEWVGEINPSNGRTNYNENFKNRFTISADTSKNTAYLQMNSLRAEDTAVYYCARGGRLDQWGQGTLVTVSSGGGGSGGGGSGGGGSDIQMTQSPSSLSASVGDRVTITCKASQNLRSKVAWYQQKPGKAPKLLIYSASYRYSGVPSRFSGSGSGTDFTLTISSLQPEDFATYYCQQYSNYPYTFGQGTKVEIK

SEQ ID NO: 2208 - DNA, 711 bp, synthetic construct
  misc_feature 1..711: note = IGF1R23-HL
  source 1..711: mol_type = other DNA
gaagtccagcttgttgaaagcggaggcggtctggttcagcctggtggatctctgagactgagctgcgctgcaagcggctacacattcacacgcttttggattcattgggtgaggcaggcccctggaaaaggactcgaatgggtgggcgagatcaatcctagcaacggtcggaccaactacaacgagaacttcaagaaccggttcaccatctctgccgacacctccaagaataccgcatacctgcagatgaatagcctccgagccgaggacactgccgtctattactgtgctaggggaggacgccttgatcagtggggacaggggacacttgtgactgtgtcatccggtgggggaggtagtgggggaggtggaagcggcggaggaggcagcgatattcagatgacccagagcccaagctccttgagcgctagcgttggcgatcgtgtgactatcacctgtaaggctagccagaacctgcgaagcaaggtcgcatggtatcagcagaaacccggcaaagccccaaagctgctgatctactccgcatcctatcggtattccggcgtgccaagcagattcagtgggagtgggagcggaactgactttaccctcaccatctcatccctgcagcctgaggactttgccacctactattgccagcagtattccaactacccctacacctttggccagggcacaaaagtggagatcaag

SEQ ID NO: 2209 - protein, 492 aa, synthetic construct
  REGION 1..492: note = IGF1R23HLxI2CHL
EVQLVESGGGLVQPGGSLRLSCAASGYTFTRFWIHWVRQAPGKGLEWVGEINPSNGRTNYNENFKNRFTISADTSKNTAYLQMNSLRAEDTAVYYCARGGRLDQWGQGTLVTVSSGGGGSGGGGSGGGGSDIQMTQSPSSLSASVGDRVTITCKASQNLRSKVAWYQQKPGKAPKLLIYSASYRYSGVPSRFSGSGSGTDFTLTISSLQPEDFATYYCQQYSNYPYTFGQGTKVEIKSGGGGSEVQLVESGGGLVQPGGSLKLSCAASGFTFNKYAMNWVRQAPGKGLEWVARIRSKYNNYATYYADSVKDRFTISRDDSKNTAYLQMNNLKTEDTAVYYCVRHGNFGNSYISYWAYWGQGTLVTVSSGGGGSGGGGSGGGGSQTVVTQEPSLTVSPGGTVTLTCGSSTGAVTSGNYPNWVQQKPGQAPRGLIGGTKFLAPGTPARFSGSLLGGKAALTLSGVQPEDEAEYYCVLWYSNRWVFGGGTKLTVL

SEQ ID NO: 2210 - DNA, 1476 bp, synthetic construct
  misc_feature 1..1476: note = IGF1R23HLxI2CHL
  source 1..1476: mol_type = other DNA
gaagtccagcttgttgaaagcggaggcggtctggttcagcctggtggatctctgagactgagctgcgctgcaagcggctacacattcacacgcttttggattcattgggtgaggcaggcccctggaaaaggactcgaatgggtgggcgagatcaatcctagcaacggtcggaccaactacaacgagaacttcaagaaccggttcaccatctctgccgacacctccaagaataccgcatacctgcagatgaatagcctccgagccgaggacactgccgtctattactgtgctaggggaggacgccttgatcagtggggacaggggacacttgtgactgtgtcatccggtgggggaggtagtgggggaggtggaagcggcggaggaggcagcgatattcagatgacccagagcccaagctccttgagcgctagcgttggcgatcgtgtgactatcacctgtaaggctagccagaacctgcgaagcaaggtcgcatggtatcagcagaaacccggcaaagccccaaagctgctgatctactccgcatcctatcggtattccggcgtgccaagcagattcagtgggagtgggagcggaactgactttaccctcaccatctcatccctgcagcctgaggactttgccacctactattgccagcagtattccaactacccctacacctttggccagggcacaaaagtggagatcaagtccggaggtggtggatccgaggtgcagctggtcgagtctggaggaggattggtgcagcctggagggtcattgaaactctcatgtgcagcctctggattcaccttcaataagtacgccatgaactgggtccgccaggctccaggaaagggtttggaatgggttgctcgcataagaagtaaatataataattatgcaacatattatgccgattcagtgaaagacaggttcaccatctccagagatgattcaaaaaacactgcctatctacaaatgaacaacttgaagactgaggacactgccgtgtactactgtgtgagacatgggaacttcggtaatagctacatatcctactgggcttactggggccaagggactctggtcaccgtctcctcaggtggtggtggttctggcggcggcggctccggtggtggtggttctcagactgttgtgactcaggaaccttcactcaccgtatcacctggtggaacagtcacactcacttgtggctcctcgactggggctgttacatctggcaactacccaaactgggtccaacaaaaaccaggtcaggcaccccgtggtctaataggtgggactaagttcctcgcccccggtactcctgccagattctcaggctccctgcttggaggcaaggctgccctcaccctctcaggggtacagccagaggatgaggcagaatattactgtgttctatggtacagcaaccgctgggtgttcggtggaggaaccaaactgactgtccta

SEQ ID NO: 2211 - protein, 120 aa, synthetic construct
  REGION 1..120: note = IGF1R24-H
EVQLVESGGELVQPGGSLRLSCAASGFTFSSYAMSWVRQAPGKGLEWVSRISPSGGSTYYADSVKGRFTISADTSKNTAYLQMNSLRAEDTAVYYCAREEYYYWGAMDVWGQGTLVTVSS

SEQ ID NO: 2212 - protein, 5 aa, synthetic construct
  REGION 1..5: note = IGF1R24-HCDR1
SYAMS

SEQ ID NO: 2213 - protein, 17 aa, synthetic construct
  REGION 1..17: note = IGF1R24-HCDR2
RISPSGGSTYYADSVKG

SEQ ID NO: 2214 - protein, 11 aa, synthetic construct
  REGION 1..11: note = IGF1R24-HCDR3
EEYYYWGAMDV

SEQ ID NO: 2215 - DNA, 360 bp, synthetic construct
  misc_feature 1..360: note = IGF1R24-H
  source 1..360: mol_type = other DNA
gaagttcagctggtggaatccgggggagagcttgttcagcctggcggatcacttaggctgtcctgtgctgcaagcggcttcaccttctctagctatgccatgtcatgggtgcgacaggcccctggaaaaggactggagtgggtctcacgtatctctccaagtggcggatccacatactacgccgatagcgtgaaagggaggtttaccatttccgctgacacctccaagaacaccgcctacctgcagatgaactcactgagagccgaagacactgccgtgtactattgcgcacgggaggagtactactattggggagctatggacgtgtggggacagggaacattggtgactgtgtcttcc

SEQ ID NO: 2216 - protein, 107 aa, synthetic construct
  REGION 1..107: note = IGF1R24-L
DIQMTQSPSSLSASVGDRVTITCRASQSISSYLAWYQQKPGKAPKLLIYGASSRASGVPSRFSGSGSGTDFTLTISSLQPEDFATYYCQQYYSSPLTFGQGTKVEIK

SEQ ID NO: 2217 - protein, 11 aa, synthetic construct
  REGION 1..11: note = IGF1R24-LCDR1
RASQSISSYLA

SEQ ID NO: 2218 - protein, 7 aa, synthetic construct
  REGION 1..7: note = IGF1R24-LCDR2
GASSRAS

SEQ ID NO: 2219 - protein, 9 aa, synthetic construct
  REGION 1..9: note = IGF1R24-LCDR3
QQYYSSPLT

SEQ ID NO: 2220 - DNA, 321 bp, synthetic construct
  misc_feature 1..321: note = IGF1R24-L
  source 1..321: mol_type = other DNA
gatatccagatgacacagagcccaagctcactgagcgctagcgtcggagatagagtcaccatcacctgtagggcaagccagagcatctctagctacctggcatggtaccagcagaaacctggcaaggctcccaagctcctgatctacggcgcttcatctagagctagcggcgttccctcacgatttagcggaagcggaagcggaactgacttcaccctgaccatttcaagcctccagcctgaggatttcgccacctactactgccagcagtactactctagcccactcacatttgggcaggggacaaaggtggagatcaag

SEQ ID NO: 2221 - protein, 242 aa, synthetic construct
  REGION 1..242: note = IGF1R24-HL
EVQLVESGGELVQPGGSLRLSCAASGFTFSSYAMSWVRQAPGKGLEWVSRISPSGGSTYYADSVKGRFTISADTSKNTAYLQMNSLRAEDTAVYYCAREEYYYWGAMDVWGQGTLVTVSSGGGGSGGGGSGGGGSDIQMTQSPSSLSASVGDRVTITCRASQSISSYLAWYQQKPGKAPKLLIYGASSRASGVPSRFSGSGSGTDFTLTISSLQPEDFATYYCQQYYSSPLTFGQGTKVEIK

SEQ ID NO: 2222 - DNA, 726 bp, synthetic construct
  misc_feature 1..726: note = IGF1R24-HL
  source 1..726: mol_type = other DNA
gaagttcagctggtggaatccgggggagagcttgttcagcctggcggatcacttaggctgtcctgtgctgcaagcggcttcaccttctctagctatgccatgtcatgggtgcgacaggcccctggaaaaggactggagtgggtctcacgtatctctccaagtggcggatccacatactacgccgatagcgtgaaagggaggtttaccatttccgctgacacctccaagaacaccgcctacctgcagatgaactcactgagagccgaagacactgccgtgtactattgcgcacgggaggagtactactattggggagctatggacgtgtggggacagggaacattggtgactgtgtcttccggtggcggaggaagcggaggtggcggaagcggaggcggtggaagcgatatccagatgacacagagcccaagctcactgagcgctagcgtcggagatagagtcaccatcacctgtagggcaagccagagcatctctagctacctggcatggtaccagcagaaacctggcaaggctcccaagctcctgatctacggcgcttcatctagagctagcggcgttccctcacgatttagcggaagcggaagcggaactgacttcaccctgaccatttcaagcctccagcctgaggatttcgccacctactactgccagcagtactactctagcccactcacatttgggcaggggacaaaggtggagatcaag

SEQ ID NO: 2223 - protein, 497 aa, synthetic construct
  REGION 1..497: note = IGF1R24HLxI2CHL
EVQLVESGGELVQPGGSLRLSCAASGFTFSSYAMSWVRQAPGKGLEWVSRISPSGGSTYYADSVKGRFTISADTSKNTAYLQMNSLRAEDTAVYYCAREEYYYWGAMDVWGQGTLVTVSSGGGGSGGGGSGGGGSDIQMTQSPSSLSASVGDRVTITCRASQSISSYLAWYQQKPGKAPKLLIYGASSRASGVPSRFSGSGSGTDFTLTISSLQPEDFATYYCQQYYSSPLTFGQGTKVEIKSGGGGSEVQLVESGGGLVQPGGSLKLSCAASGFTFNKYAMNWVRQAPGKGLEWVARIRSKYNNYATYYADSVKDRFTISRDDSKNTAYLQMNNLKTEDTAVYYCVRHGNFGNSYISYWAYWGQGTLVTVSSGGGGSGGGGSGGGGSQTVVTQEPSLTVSPGGTVTLTCGSSTGAVTSGNYPNWVQQKPGQAPRGLIGGTKFLAPGTPARFSGSLLGGKAALTLSGVQPEDEAEYYCVLWYSNRWVFGGGTKLTVL

SEQ ID NO: 2224 - DNA, 1491 bp, synthetic construct
  misc_feature 1..1491: note = IGF1R24HLxI2CHL
  source 1..1491: mol_type = other DNA
gaagttcagctggtggaatccgggggagagcttgttcagcctggcggatcacttaggctgtcctgtgctgcaagcggcttcaccttctctagctatgccatgtcatgggtgcgacaggcccctggaaaaggactggagtgggtctcacgtatctctccaagtggcggatccacatactacgccgatagcgtgaaagggaggtttaccatttccgctgacacctccaagaacaccgcctacctgcagatgaactcactgagagccgaagacactgccgtgtactattgcgcacgggaggagtactactattggggagctatggacgtgtggggacagggaacattggtgactgtgtcttccggtggcggaggaagcggaggtggcggaagcggaggcggtggaagcgatatccagatgacacagagcccaagctcactgagcgctagcgtcggagatagagtcaccatcacctgtagggcaagccagagcatctctagctacctggcatggtaccagcagaaacctggcaaggctcccaagctcctgatctacggcgcttcatctagagctagcggcgttccctcacgatttagcggaagcggaagcggaactgacttcaccctgaccatttcaagcctccagcctgaggatttcgccacctactactgccagcagtactactctagcccactcacatttgggcaggggacaaaggtggagatcaagtccggaggtggtggatccgaggtgcagctggtcgagtctggaggaggattggtgcagcctggagggtcattgaaactctcatgtgcagcctctggattcaccttcaataagtacgccatgaactgggtccgccaggctccaggaaagggtttggaatgggttgctcgcataagaagtaaatataataattatgcaacatattatgccgattcagtgaaagacaggttcaccatctccagagatgattcaaaaaacactgcctatctacaaatgaacaacttgaagactgaggacactgccgtgtactactgtgtgagacatgggaacttcggtaatagctacatatcctactgggcttactggggccaagggactctggtcaccgtctcctcaggtggtggtggttctggcggcggcggctccggtggtggtggttctcagactgttgtgactcaggaaccttcactcaccgtatcacctggtggaacagtcacactcacttgtggctcctcgactggggctgttacatctggcaactacccaaactgggtccaacaaaaaccaggtcaggcaccccgtggtctaataggtgggactaagttcctcgcccccggtactcctgccagattctcaggctccctgcttggaggcaaggctgccctcaccctctcaggggtacagccagaggatgaggcagaatattactgtgttctatggtacagcaaccgctgggtgttcggtggaggaaccaaactgactgtccta

SEQ ID NO: 2225 - protein, 27 aa, Macaca fascicularis
  REGION 1..27: note = MISC_FEATURE - Macaca fascicularis CD3 epsilon FN18+ 1-27
QDGNEEMGSITQTPYQVSISGTTILTC

SEQ ID NO: 2226 - protein, 27 aa, Macaca fascicularis
  REGION 1..27: note = MISC_FEATURE - Macaca fascicularis CD3 epsilon FN18- 1-27
QDGNEEMGSITQTPYQVSISGTTVILT

SEQ ID NO: 2227 - protein, 27 aa, Macaca mulatta
  REGION 1..27: note = MISC_FEATURE - Macaca mulatta CD3 epsilon 1-27
QDGNEEMGSITQTPYHVSISGTTVILT

SEQ ID NO: 2228 - protein, 5 aa, synthetic construct
  REGION 1..5: note = Spacer
GGGGS

SEQ ID NO: 2229 - protein, 5 aa, synthetic construct
  REGION 1..5: note = Synthetic peptide
QDGNE

SEQ ID NO: 2230 - DNA, 288 bp, Callithrix jacchus
  source 1..288: mol_type = genomic DNA
caggacggtaatgaagaaatgggtgatactacacagaacccatataaagtttccatctcaggaaccacagtaacactgacatgccctcggtatgatggacatgaaataaaatggctcgtaaatagtcaaaacaaagaaggtcatgaggaccacctgttactggaggacttttcggaaatggagcaaagtggttattatgcctgcctctccaaagagactcccgcagaagaggcgagccattatctctacctgaaggcaagagtgtgtgagaactgcgtggaggtggat

SEQ ID NO: 2231 - DNA, 288 bp, Saguinus oedipus
  source 1..288: mol_type = genomic DNA
caggacggtaatgaagaaatgggtgatactacacagaacccatataaagtttccatctcaggaaccacagtaacactgacatgccctcggtatgatggacatgaaataaaatggcttgtaaatagtcaaaacaaagaaggtcatgaggaccacctgttactggaggatttttcggaaatggagcaaagtggttattatgcctgcctctccaaagagactcccgcagaagaggcgagccattatctctacctgaaggcaagagtgtgtgagaactgcgtggaggtggat

SEQ ID NO: 2232 - DNA, 288 bp, Saguinus oedipus
  source 1..288: mol_type = genomic DNA
caggacggtaatgaagagattggtgatactacccagaacccatataaagtttccatctcaggaaccacagtaacactgacatgccctcggtatgatggacaggaaataaaatggctcgtaaatgatcaaaacaaagaaggtcatgaggaccacctgttactggaagatttttcagaaatggaacaaagtggttattatgcctgcctctccaaagagacccccacagaagaggcgagccattatctctacctgaaggcaagagtgtgtgagaactgcgtggaggtggat

SEQ ID NO: 2233 - protein, 10 aa, synthetic construct
  REGION 1..10: note = Flag-tag
TGDYKDDDDK

SEQ ID NO: 2234 - protein, 9 aa, synthetic construct
  REGION 1..9: note = Linker
SRTRSGSQL

SEQ ID NO: 2235 - protein, 4 aa, synthetic construct
  REGION 1..4: note = Linker
SGSG

Listing of the claims:

1. A bispecific single chain antibody molecule comprising a first binding domain capable of binding to an epitope of human and non-chimpanzee primate CD3ε (epsilon) chain, wherein the epitope is part of an amino acid sequence comprised in the group consisting of SEQ ID NOs. 2, 4, 6, and 8, and a second binding domain capable of binding to an antigen selected from the group consisting of Prostate Stem Cell Antigen (PSCA), B-Lymphocyte antigen CD19 (CD19), hepatocyte growth factor receptor (C-MET), Endosialin, the EGF-like domain 1 of EpCAM, encoded by exon 2, Fibroblast activation protein alpha (FAP alpha) and Insulin-like growth factor I receptor (IGF-IR or IGF-1R).

2. The bispecific single chain antibody molecule of claim 1, wherein at least one of said first or second binding domain is CDR-grafted, humanized or human.

3. The bispecific single chain antibody molecule of claim 1, wherein the first binding domain capable of binding to an epitope of human and non-chimpanzee primate CD3ε chain comprises a VL region comprising CDR-L1, CDR-L2 and CDR-L3 selected from:
(a) CDR-L1 as depicted in SEQ ID NO. 27, CDR-L2 as depicted in SEQ ID NO. 28 and CDR-L3 as depicted in SEQ ID NO. 29;
(b) CDR-L1 as depicted in SEQ ID NO. 117, CDR-L2 as depicted in SEQ ID NO. 118 and CDR-L3 as depicted in SEQ ID NO. 119; and
(c) CDR-L1 as depicted in SEQ ID NO. 153, CDR-L2 as depicted in SEQ ID NO. 154 and CDR-L3 as depicted in SEQ ID NO. 155.

4. The bispecific single chain antibody molecule of claim 1, wherein the first binding domain capable of binding to an epitope of human and non-chimpanzee primate CD3ε chain comprises a VH region comprising CDR-H 1, CDR-H2 and CDR-H3 selected from:
(a) CDR-H1 as depicted in SEQ ID NO. 12, CDR-H2 as depicted in SEQ ID NO. 13 and CDR-H3 as depicted in SEQ ID NO. 14;
(b) CDR-H1 as depicted in SEQ ID NO. 30, CDR-H2 as depicted in SEQ ID NO. 31 and CDR-H3 as depicted in SEQ ID NO. 32;
(c) CDR-H1 as depicted in SEQ ID NO. 48, CDR-H2 as depicted in SEQ ID NO. 49 and CDR-H3 as depicted in SEQ ID NO. 50;
(d) CDR-H1 as depicted in SEQ ID NO. 66, CDR-H2 as depicted in SEQ ID NO. 67 and CDR-H3 as depicted in SEQ ID NO. 68;
(e) CDR-H1 as depicted in SEQ ID NO. 84, CDR-H2 as depicted in SEQ ID NO. 85 and CDR-H3 as depicted in SEQ ID NO. 86;
(f) CDR-H1 as depicted in SEQ ID NO. 102, CDR-H2 as depicted in SEQ ID NO. 103 and CDR-H3 as depicted in SEQ ID NO. 104;
(g) CDR-H1 as depicted in SEQ ID NO. 120, CDR-H2 as depicted in SEQ ID NO. 121 and CDR-H3 as depicted in SEQ ID NO. 122;
(h) CDR-H1 as depicted in SEQ ID NO. 138, CDR-H2 as depicted in SEQ ID NO. 139 and CDR-H3 as depicted in SEQ ID NO. 140;
(i) CDR-H1 as depicted in SEQ ID NO. 156, CDR-H2 as depicted in SEQ ID NO. 157 and CDR-H3 as depicted in SEQ ID NO. 158; and
(j) CDR-H1 as depicted in SEQ ID NO. 174, CDR-H2 as depicted in SEQ ID NO. 175 and CDR-H3 as depicted in SEQ ID NO. 176.

5. The bispecific single chain antibody molecule of claim 1, wherein the first binding domain capable of binding to an epitope of human and non-chimpanzee primate CD3ε chain comprises a VL region selected from the group consisting of a VL region as depicted in SEQ ID NO. 35, 39, 125, 129, 161 or 165.

6. The bispecific single chain antibody molecule of claim 1, wherein the first binding domain capable of binding to an epitope of human and non-chimpanzee primate CD3ε chain comprises a VH region selected from the group consisting of a VH region as depicted in SEQ ID NO. 15, 19, 33, 37, 51, 55, 69, 73, 87, 91, 105, 109, 123, 127, 141,145, 159, 163, 177 or 181.

7. The bispecific single chain antibody molecule of claim 1, wherein the first binding domain capable of binding to an epitope of human and non-chimpanzee primate CD3c chain comprises a VL region and a VH region selected from the group consisting of:
(a) a VL region as depicted in SEQ ID NO. 17 or 21 and a VH region as depicted in SEQ ID NO. 15 or 19;
(b) a VL region as depicted in SEQ ID NO. 35 or 39 and a VH region as depicted in SEQ ID NO. 33 or 37;
(c) a VL region as depicted in SEQ ID NO. 53 or 57 and a VH region as depicted in SEQ ID NO. 51 or 55;
(d) a VL region as depicted in SEQ ID NO. 71 or 75 and a VH region as depicted in SEQ ID NO. 69 or 73;
(e) a VL region as depicted in SEQ ID NO. 89 or 93 and a VH region as depicted in SEQ ID NO. 87 or 91;
(f) a VL region as depicted in SEQ ID NO. 107 or 111 and a VH region as depicted in SEQ ID NO. 105 or 109;
(g) a VL region as depicted in SEQ ID NO. 125 or 129 and a VH region as depicted in SEQ ID NO. 123 or 127;
(h) a VL region as depicted in SEQ ID NO. 143 or 147 and a VH region as depicted in SEQ ID NO. 141 or 145;
(i) a VL region as depicted in SEQ ID NO. 161 or 165 and a VH region as depicted in SEQ ID NO. 159 or 163; and
(j) a VL region as depicted in SEQ ID NO. 179 or 183 and a VH region as depicted in SEQ ID NO. 177 or 181.

8. The bispecific single chain antibody molecule of claim 7, wherein the first binding domain capable of binding to an epitope of human and non-chimpanzee primate CD3c chain comprises an amino acid sequence selected from the group consisting of SEQ ID NOs: 23, 25, 41, 43, 59, 61, 77, 79, 95, 97, 113, 115, 131, 133, 149, 151, 167, 169, 185 or 187.

9. (canceled)

10. The bispecific single chain antibody molecule of claim 1, wherein the bispecific single chain antibody molecule comprises a group of the following sequences as CDR H1, CDR H2, CDR H3, CDR L1, CDR L2 and CDR L3 in the second binding domain selected from:
(a) CDR H1-3 of SEQ ID NO: 382-384 and CDR L1-3 of SEQ ID NO: 377-379;
(b) CDR H1-3 of SEQ ID NO: 400-402 and CDR L1-3 of SEQ ID NO: 395-397;
(c) CDR H1-3 of SEQ ID NO: 414-416 and CDR L1-3 of SEQ ID NO: 409-411;
(d) CDR H1-3 of SEQ ID NO: 432-434 and CDR L1-3 of SEQ ID NO: 427-429;
(e) CDR H1-3 of SEQ ID NO: 1215-1217 and CDR L1-3 of SEQ ID NO: 1220 1222;
(f) CDR H1-3 of SEQ ID NO: 1187-1189 and CDR L1-3 of SEQ ID NO: 1192 1194;
(g) CDR H1-3 of SEQ ID NO: 1173-1175 and CDR L1-3 of SEQ ID NO: 1178 1180;
(h) CDR H1-3 of SEQ ID NO: 1229-1231 and CDR L1-3 of SEQ ID NO: 1234 1236;
(i) CDR H1-3 of SEQ ID NO: 1201-1203 and CDR L1-3 of SEQ ID NO: 1206 1208;
(k) CDR H1-3 of SEQ ID NO: 1257-1259 and CDR L1-3 of SEQ ID NO: 1262 1264; and
(l) CDR H1-3 of SEQ ID NO: 1243-1245 and CDR L1-3 of SEQ ID NO: 1248 1250.

11. The bispecific single chain antibody molecule of claim 10, wherein the binding domains are arranged in the order VH PSCA-VL PSCA-VH CD3-VL CD3 or VL PSCA-VH PSCA-VH CD3-VL CD3.

12. The bispecific single chain antibody molecule of claim 11, wherein the bispecific single chain antibody molecule comprises a sequence selected from:
(a) an amino acid sequence as depicted in any of SEQ ID NOs: 389, 421, 439, 391, 405, 423, 441, 1226, 1198, 1184, 1240, 1212, 1268 or1254;
(b) an amino acid sequence encoded by a nucleic acid sequence as depicted in any of SEQ ID NOs: 390, 422, 440, 392, 406, 424, 442, 1227, 1199, 1185, 1241, 1213 1269 or 1255; and
(c) an amino acid sequence at least 90/0 identical, more preferred at least 95′)/0 identical, most preferred at least 9613/0 identical to the amino acid sequence of (a) or (b).

13. (canceled)

14. The bispecific single chain antibody molecule of claim 1, wherein the bispecific single chain antibody molecule comprises a group of the following sequences as CDR H1, CDR H2, CDR H3, CDR L1, CDR L2 and CDR L3 in the second binding domain selected from:
(a) CDR H1-3 of SEQ ID NO: 478-480 and CDR L1-3 of SEQ ID NO: 473 475;
(b) CDR H1-3 of SEQ ID NO: 530-532 and CDR L1-3 of SEQ ID NO: 525 527;
(c) CDR H1-3 of SEQ ID NO: 518-520 and CDR L1-3 of SEQ ID NO: 513 515; and
(d) CDR H1-3 of SEQ ID NO: 506-508 and CDR L1-3 of SEQ ID NO: 501-503;
(e) CDR H1-3 of SEQ ID NO: 494-496 and CDR L1-3 of SEQ ID NO: 489-491;
(f) CDR H1-3 of SEQ ID NO: 542-544 and CDR L1-3 of SEQ ID NO: 537-539;
(g) CDR H1-3 of SEQ ID NO: 554-556 and CDR L1-3 of SEQ ID NO: 549-551;
(h) CDR H1-3 of SEQ ID NO: 566-568 and CDR L1-3 of SEQ ID NO: 561-563;
(i) CDR H1-3 of SEQ ID NO: 578-580 and CDR L1-3 of SEQ ID NO: 573-575;
(j) CDR H1-3 of SEQ ID NO: 590-592 and CDR L1-3 of SEQ ID NO: 585-587;
(k) CDR H1-3 of SEQ ID NO: 602-604 and CDR L1-3 of SEQ ID NO: 597-599;
(l) CDR H1-3 of SEQ ID NO: 614-616 and CDR L1-3 of SEQ ID NO: 609-611,
(m) CDR H1-3 of SEQ ID NO: 626-628 and CDR L1-3 of SEQ ID NO: 621-623;
(n) CDR H1-3 of SEQ ID NO: 638-640 and CDR L1-3 of SEQ ID NO: 633-635;
(o) CDR H1-3 of SEQ ID NO: 650-652 and CDR L1-3 of SEQ ID NO: 645-647;
(p) CDR H1-3 of SEQ ID NO: 662-664 and CDR L1-3 of SEQ ID NO: 657 659;
(q) CDR H1-3 of SEQ ID NO: 674-676 and CDR L1-3 of SEQ ID NO: 669 671;
(r) CDR H1-3 of SEQ ID NO: 686-688 and CDR L1-3 of SEQ ID NO: 681 683;
(s) CDR H1-3 of SEQ ID NO: 698-700 and CDR L1-3 of SEQ ID NO: 693-695;
(t) CDR H1-3 of SEQ ID NO: 710-712 and CDR L1-3 of SEQ ID NO: 705-707;
(u) CDR H1-3 of SEQ ID NO: 722-724 and CDR L1-3 of SEQ ID NO: 717-719;
(v) CDR H1-3 of SEQ ID NO: 734-736 and CDR L1-3 of SEQ ID NO: 729-731;
(w) CDR H1-3 of SEQ ID NO: 746-748 and CDR L1-3 of SEQ ID NO: 741-743;
(x) CDR H1-3 of SEQ ID NO: 758-760 and CDR L1-3 of SEQ ID NO: 753-755;
(y) CDR H1-3 of SEQ ID NO: 1271-1273 and CDR L1-3 of SEQ ID NO: 1276 1278;
(z) CDR H1-3 of SEQ ID NO: 1285-1287 and CDR L1-3 of SEQ ID NO: 1290 1292;
(aa) CDR H1-3 of SEQ ID NO: 1299-1301 and CDR L1-3 of SEQ ID NO: 1304 1306;
(ab) CDR H1-3 of SEQ ID NO: 1313-1315 and CDR L1-3 of SEQ ID NO: 1318 1320;
(ac) CDR H1-3 of SEQ ID NO: 1327-1329 and CDR L1-3 of SEQ ID NO: 1332 1334;
(ad) CDR H1-3 of SEQ ID NO: 1341-1343 and CDR L1-3 of SEQ ID NO: 1346 1348;
(ae) CDR H1-3 of SEQ ID NO: 1355-1357 and CDR L1-3 of SEQ ID NO: 1360 1362;
(af) CDR H1-3 of SEQ ID NO: 1369-1371 and CDR L1-3 of SEQ ID NO: 1374 1376; and
(ag) CDR H1-3 of SEQ ID NO: 1383-1385 and CDR L1-3 of SEQ ID NO: 1388 1390.

15. The bispecific single chain antibody molecule of claim 14, wherein the binding domains are arranged in the order VH CD19-VL CD19-VH CD3-VL CD3 or VL CD19-VH CD19-VH CD3-VL CD3.

16. The bispecific single chain antibody molecule of claim 15, wherein the bispecific single chain antibody molecule comprises a sequence selected from:
(a) an amino acid sequence as depicted in any of SEQ ID NOs:481, 485, 483, 533, 521, 509, 497, 545, 557, 569, 581, 593, 605, 617, 629, 641, 653, 665, 677, 689, 701, 713, 725, 737, 749, 761, 1282, 1296, 1310, 1324, 1338, 1352, 1366, 1380 or 1394;
(b) an amino acid sequence encoded by a nucleic acid sequence as depicted in any of SEQ ID NOs: 482, 486, 484, 534, 522, 510, 498, 546, 558, 570, 582, 594, 606, 618, 630, 642, 654, 666, 678, 690, 702, 714, 726, 738, 750, 762, 1283, 1297, 1311, 1325, 1339, 1353, 1367, 1381 or 1395; and
(c) an amino acid sequence at least 90% identical, more preferred at least 95% identical, most preferred at least 96% identical to the amino acid sequence of (a) or (b).

17. (canceled)

18. The bispecific single chain antibody molecule of claim 1, wherein the bispecific single chain antibody molecule comprises a group of the following sequences as CDR H1, CDR H2, CDR H3, CDR L1, CDR L2 and CDR L3 in the second binding domain selected from:
(a) CDR H1-3 of SEQ ID NO: 821-823 and CDR L1-3 of SEQ ID NO: 816 818;
(b) CDR H1-3 of SEQ ID NO: 836-838 and CDR L1-3 of SEQ ID NO: 833 835;
(c) CDR H1-3 of SEQ ID NO: 845-847 and CDR L1-3 of SEQ ID NO: 840 842; and
(d) CDR H1-3 of SEQ ID NO: 863-865 and CDR L1-3 of SEQ ID NO: 858-860;
(e) CDR H1-3 of SEQ ID NO: 881-883 and CDR L1-3 of SEQ ID NO: 876-878;
(f) CDR H1-3 of SEQ ID NO: 899-901 and CDR L1-3 of SEQ ID NO: 894-896;
(g) CDR H1-3 of SEQ ID NO: 1401-1403 and CDR L1-3 of SEQ ID NO: 1406 1408;
(h) CDR H1-3 of SEQ ID NO: 1415-1417 and CDR L1-3 of SEQ ID NO: 1420 1422;
(i) CDR H1-3 of SEQ ID NO: 1429-1431 and CDR L1-3 of SEQ ID NO: 1434 1436;
(j) CDR H1-3 of SEQ ID NO: 1443-1445 and CDR L1-3 of SEQ ID NO: 1448 1450;
(k) CDR H1-3 of SEQ ID NO: 1457-1459 and CDR L1-3 of SEQ ID NO: 1462 1464;
(l) CDR H1-3 of SEQ ID NO: 1471-1473 and CDR L1-3 of SEQ ID NO: 1476 1478;
(m) CDR H1-3 of SEQ ID NO: 1639-1641 and CDR L1-3 of SEQ ID NO: 1644 1646;
(n) CDR H1-3 of SEQ ID NO: 1625-1627 and CDR L1-3 of SEQ ID NO: 1630 1632;
(o) CDR H1-3 of SEQ ID NO: 1611-1613 and CDR L1-3 of SEQ ID NO: 1616 1618;
(p) CDR H1-3 of SEQ ID NO: 1597-1599 and CDR L1-3 of SEQ ID NO: 1602 1604;
(q) CDR H1-3 of SEQ ID NO: 1569-1571 and CDR L1-3 of SEQ ID NO: 1574 1576;
(r) CDR H1-3 of SEQ ID NO: 1555-1557 and CDR L1-3 of SEQ ID NO: 1560 1562;
(s) CDR H1-3 of SEQ ID NO: 1583-1585 and CDR L1-3 of SEQ ID NO: 1588 1590;
(t) CDR H1-3 of SEQ ID NO: 1541-1543 and CDR L1-3 of SEQ ID NO: 1546 1548;
(u) CDR H1-3 of SEQ ID NO: 1513-1515 and CDR L1-3 of SEQ ID NO: 1518 1520;
(v) CDR H1-3 of SEQ ID NO: 1527-1529 and CDR L1-3 of SEQ ID NO: 1532 1534;
(w) CDR H1-3 of SEQ ID NO: 1499-1501 and CDR L1-3 of SEQ ID NO: 1504 1506; and
(x) CDR H1-3 of SEQ ID NO: 1485-1487 and CDR L1-3 of SEQ ID NO: 1490 1492.

19. The bispecific single chain antibody molecule of claim 18, wherein the binding domains are arranged in the order VH C-MET-VL C-MET-VH CD3-VL CD3 or VL C-MET-VH C-MET-VH CD3-VL CD3.

20. The bispecific single chain antibody molecule of claim 19, wherein the bispecific single chain antibody molecule comprises a sequence selected from:
(a) an amino acid sequence as depicted in any of SEQ ID NOs: 829, 853, 871, 889, 831, 855, 873, 891, 905, 1412, 1426, 1440, 1454, 1468, 1482, or;
(b) an amino acid sequence encoded by a nucleic acid sequence as depicted in any of SEQ ID NOs: 830, 854, 872, 890, 832, 856, 874, 892, 906, 1413, 1427, 1441, 1455, 1469, or 1483; and
(c) an amino acid sequence at least 90% identical, more preferred at least 95% identical, most preferred at least 96% identical to the amino acid sequence of (a) or (b).

21. (canceled)

22. The bispecific single chain antibody molecule of claim 1, wherein the bispecific single chain antibody molecule comprises a group of the following sequences as CDR H1, CDR H2, CDR H3, CDR L1, CDR L2 and CDR L3 in the second binding domain selected from:
(a) CDR H1-3 of SEQ ID NO: 1653-1655 and CDR L1-3 of SEQ ID NO: 1658 1660;
(b) CDR H1-3 of SEQ ID NO: 1667-1669 and CDR L1-3 of SEQ ID NO: 1672 1674;
(c) CDR H1-3 of SEQ ID NO: 1681-1683 and CDR L1-3 of SEQ ID NO: 1686 1688; and
(d) CDR H1-3 of SEQ ID NO: 1695-1697 and CDR L1-3 of SEQ ID NO: 1700 1702;
(e) CDR H1-3 of SEQ ID NO: 1709-1711 and CDR L1-3 of SEQ ID NO: 1714 1716; and
(f) CDR H1-3 of SEQ ID NO: 1723-1725 and CDR L1-3 of SEQ ID NO: 1728 1730.

23. The bispecific single chain antibody molecule of claim 22, wherein the binding domains are arranged in the order VH Endosialin-VL Endosialin-VH CD3-VL CD3 or VL Endosialin-VH Endosialin-VH CD3-VL CD3.

24. The bispecific single chain antibody molecule of claim 23, wherein the bispecific single chain antibody molecule comprises a sequence selected from:
(a) an amino acid sequence as depicted in any of SEQ ID NOs: 1664, 1678, 1692, 1706, 1720, or 1734;
(b) an amino acid sequence encoded by a nucleic acid sequence as depicted in any of SEQ ID NOs: 1665, 1679, 1693, 1707, 1721, or 1735; and
(c) an amino acid sequence at least 90% identical, more preferred at least 95% identical, most preferred at least 96% identical to the amino acid sequence of (a) or (b).

25. (canceled)

26. The bispecific single chain antibody molecule of claim 1, wherein the bispecific single chain antibody molecule comprises a group of the following sequences as CDR H1, CDR H2, CDR H3, CDR L1, CDR L2 and CDR L3 in the second binding domain selected from:
(a) CDR H1-3 of SEQ ID NO: 940-942 and CDR L1-3 of SEQ ID NO: 935 937;
(b) CDR H1-3 of SEQ ID NO: 956-958 and CDR L1-3 of SEQ ID NO: 951 953;
(c) CDR H1-3 of SEQ ID NO: 968-970 and CDR L1-3 of SEQ ID NO: 963 965;
(d) CDR H1-3 of SEQ ID NO: 980-982 and CDR L1-3 of SEQ ID NO: 975977;
(e) CDR H1-3 of SEQ ID NO: 992-994 and CDR L1-3 of SEQ ID NO: 987-989;
(f) CDR H1-3 of SEQ ID NO: 1004-1006 and CDR L1-3 of SEQ ID NO: 999 1001,
(g) CDR H1-3 of SEQ ID NO: 1028-1030 and CDR L1-3 of SEQ ID NO: 1023 1025;
(h) CDR H1-3 of SEQ ID NO: 1040-1042 and CDR L1-3 of SEQ ID NO: 1035 1037;
(i) CDR H1-3 of SEQ ID NO: 1052-1054 and CDR L1-3 of SEQ ID NO: 1047 1049;
(j) CDR H1-3 of SEQ ID NO: 1074-1076 and CDR L1-3 of SEQ ID NO: 1069 1071;
(k) CDR H1-3 of SEQ ID NO: 1086-1088 and CDR L1-3 of SEQ ID NO: 1081 1083;
(l) CDR H1-3 of SEQ ID NO: 1098-1000 and CDR L1-3 of SEQ ID NO: 1093 1095;
(m) CDR H1-3 of SEQ ID NO: 1110-1112 and CDR L1-3 of SEQ ID NO: 1105 1107;
(n) CDR H1-3 of SEQ ID NO: 1122-1124 and CDR L1-3 of SEQ ID NO: 1117 1119;
(o) CDR H1-3 of SEQ ID NO: 1016-1018 and CDR L1-3 of SEQ ID NO: 1011 1013; and
(p) CDR H1-3 of SEQ ID NO: 1765-1767 and CDR L1-3 of SEQ ID NO: 1770 1772.

27. The bispecific single chain antibody molecule of claim 26, wherein the binding domains are arranged in the order VH EpCAM-VL EpCAM-VH CD3-VL CD3 or VL EpCAM-VH EpCAM-VH CD3-VL CD3.

28. The bispecific single chain antibody molecule of claim 27, wherein the bispecific single chain antibody molecule comprises a sequence selected from:
(a) an amino acid sequence as depicted in any of SEQ ID NOs: 944, 948, 946, 960, 972, 984, 996, 1008, 1032, 1044, 1056, 1078, 1090, 1102, 1114, 1126, 1020, or 1776;
(b) an amino acid sequence encoded by a nucleic acid sequence as depicted in any of SEQ ID NOs: 945, 949, 947, 961, 973, 985, 979, 1009, 1033, 1045, 1057, 1079, 1091, 1103, 1115, 1127, 1021, or 1777; and
(c) an amino acid sequence at least 90% identical, more preferred at least 95% identical, most preferred at least 96% identical to the amino acid sequence of (a) or (b).

29. (canceled)

30. The bispecific single chain antibody molecule of claim 1, wherein the bispecific single chain antibody molecule comprises a group of the following sequences as CDR H1, CDR H2, CDR H3, CDR L1, CDR L2 and CDR L3 in the second binding domain selected from:
(a) CDR H1-3 of SEQ ID NO: 1137-1139 and CDR L1-3 of SEQ ID NO: 1132 1134;
(b) CDR H1-3 of SEQ ID NO: 1849-1851and CDR L1-3 of SEQ ID NO: 1854-1856;
(c) CDR H1-3 of SEQ ID NO: 1835-1837and CDR L1-3 of SEQ ID NO: 1840-1842;
(d) CDR H1-3 of SEQ ID NO: 1779-1781and CDR L1-3 of SEQ ID NO: 1784-1786;
(e) CDR H1-3 of SEQ ID NO: 1793-1795 and CDR L1-3 of SEQ ID NO: 1798-1800;
(f) CDR H1-3 of SEQ ID NO: 1863-1865 and CDR L1-3 of SEQ ID NO: 1868-1870;
(g) CDR H1-3 of SEQ ID NO: 1807-1809 and CDR L1-3 of SEQ ID NO: 1812-1814;
(h) CDR H1-3 of SEQ ID NO: 1821-1823 and CDR L1-3 of SEQ ID NO: 1826-1828;
(i) CDR H1-3 of SEQ ID NO: 1891-1893 and CDR L1-3 of SEQ ID NO: 1896-1898;
(j) CDR H1-3 of SEQ ID NO: 1877-1879 and CDR L1-3 of SEQ ID NO: 1882-1884;
(k) CDR H1-3 of SEQ ID NO: 1961-1963 and CDR L1-3 of SEQ ID NO: 1966-1968;
(l) CDR H1-3 of SEQ ID NO: 1947-1949 and CDR L1-3 of SEQ ID NO: 1952-1954;
(m) CDR H1-3 of SEQ ID NO: 1975-1977 and CDR L1-3 of SEQ ID NO: 1980-1982;
(n) CDR H1-3 of SEQ ID NO: 1933-1935 and CDR L1-3 of SEQ ID NO: 1938-1940;
(o) CDR H1-3 of SEQ ID NO: 1919-1921 and CDR L1-3 of SEQ ID NO: 1924-1926; and
(p) CDR H1-3 of SEQ ID NO: 1905-1907 and CDR L1-3 of SEQ ID NO: 1910-1912.

31. The bispecific single chain antibody molecule of claim 30, wherein the binding domains are arranged in the order VH FAP alpha-VL FAP alpha-VH CD3-VL CD3 or VL FAP alpha-VH FAP alpha-VH CD3-VL CD3.

32. The bispecific single chain antibody molecule of claim 31, wherein the bispecific single chain antibody molecule comprises a sequence selected from:
(a) an amino acid sequence as depicted in any of SEQ ID NOs: 1143, 1147, 1145, 1860, 1846, 1790, 1804, 1874, 1818, or 1832;
(b) an amino acid sequence encoded by a nucleic acid sequence as depicted in any of SEQ ID NOs: 1144, 1148, 1146, 1861, 1847, 1791, 1805, 1875, 1818 or 1833; and
(c) an amino acid sequence at least 90% identical, more preferred at least 95% identical, most preferred at least 96% identical to the amino acid sequence of (a) or (b).

33. The bispecific single chain antibody molecule of claim 1, wherein the second binding domain is capable of binding to human Insulin-like growth factor I receptor (IGF-IR or IGF-1R), and/or a non-Chimpanzee primate IGF-1R.

34. The bispecific single chain antibody molecule of claim 33, wherein the bispecific single chain antibody molecule comprises a group of the following sequences as CDR H1, CDR H2, CDR H3, CDR L1, CDR L2 and CDR L3 in the second binding domain selected from:
(a) CDR H1-3 of SEQ ID NO: 2016-2018and CDR L1-3 of SEQ ID NO: 2021 2023;
(b) CDR H1-3 of SEQ ID NO: 2030-2032 and CDR L1-3 of SEQ ID NO: 2035 2037;
(c) CDR H1-3 of SEQ ID NO: 2044-2046 and CDR L1-3 of SEQ ID NO: 2049 2051;
(d) CDR H1-3 of SEQ ID NO: 2058-2060 and CDR L1-3 of SEQ ID NO: 2063 2065;
(e) CDR H1-3 of SEQ ID NO: 2072-2074 and CDR L1-3 of SEQ ID NO: 2077 2079;
(f) CDR H1-3 of SEQ ID NO: 2086-2088 and CDR L1-3 of SEQ ID NO: 2091 2093;
(g) CDR H1-3 of SEQ ID NO: 2100-2102 and CDR L1-3 of SEQ ID NO: 2105 2107;
(h) CDR H1-3 of SEQ ID NO: 2114-2116 and CDR L1-3 of SEQ ID NO: 2119 2121;
(i) CDR H1-3 of SEQ ID NO: 2128-2130 and CDR L1-3 of SEQ ID NO: 2133 2135;
(j) CDR H1-3 of SEQ ID NO: 2142-2144 and CDR L1-3 of SEQ ID NO: 2147 2149;
(k) CDR H1-3 of SEQ ID NO: 2156-2158 and CDR L1-3 of SEQ ID NO: 2161 2163;
(l) CDR H1-3 of SEQ ID NO: 2170-2172 and CDR L1-3 of SEQ ID NO: 2175 2177;
(m) CDR H1-3 of SEQ ID NO: 2184-2186 and CDR L1-3 of SEQ ID NO: 2189 2191;
(n) CDR H1-3 of SEQ ID NO: 2198-2200 and CDR L1-3 of SEQ ID NO: 2203 2205; and
(o) CDR H1-3 of SEQ ID NO: 2212-2214 and CDR L1-3 of SEQ ID NO: 2217 2219.

35. The bispecific single chain antibody molecule of claim 34, wherein the binding domains are arranged in the order VH IGF-1R-VL IGF-1R-VH CD3-VL CD3 or VL IGF-1R-VH IGF-1R-VH CD3-VL CD3.

36. The bispecific single chain antibody molecule of claim 35, wherein the bispecific single chain antibody molecule comprises a sequence selected from:
(a) an amino acid sequence as depicted in any of SEQ ID NOs: 2027, 2041, 2055, 2069, 2083, 2097, 2111, 2125, 2139, 2153, 2167, 2181, 2195, 2209, or 2223;
(b) an amino acid sequence encoded by a nucleic acid sequence as depicted in any of SEQ ID NOs: 2028, 2042, 2056, 2070, 2084, 2098, 2112, 2126, 2140, 2154, 2168, 2182, 2196, 2210, or 2224; and
(c) an amino acid sequence at least 90% identical, more preferred at least 95% identical, most preferred at least 96% identical to the amino acid sequence of (a) or (b).

37. A nucleic acid sequence encoding the bispecific single chain antibody molecule of claim 1.

38. A vector comprising the nucleic acid sequence of claim 37.

39-40. (canceled)

41. A host cell transformed or transfected with the vector of claim 38.

42. A process for of producing a bispecific single chain antibody molecule, said process comprising culturing h host cell of claim 41 under conditions allowing the expression of the bispecific single chain antibody molecule.

43. A pharmaceutical composition comprising the bispecific single chain antibody molecule of claim 1.

44-51. (canceled)

52. A method for preventing, treating, or amelioratinq a cancer in a subject in the need thereof, said method comprising the step of of administerinq an effective amount of the bispecific single chain antibody of claim 1.

53. (canceled)

54. The method of claim 52, wherein the cancer is
(a) prostate cancer, bladder cancer or pancreatic cancer;
(b) a B-cell malignancy, such as B-NHL (B cell non-Hodgkin Lymphoma), BALL (acute lymphoblastic B cell leukemia), B-CLL (chronic lymphocytic B cell leukemia), or Multiple Myeloma;
(c) a carcinoma, sarcoma, glioblastoma/astrocytoma, melanoma, mesothelioma, Wilms tumor or a hematopoietic malignancy such as leukemia, lymphoma or multiple myeloma;
(d) carcinomas (breast, kidney, lung, colorectal, colon, pancreas mesothelioma), sarcomas, and neuroectodermal tumors (melanoma, glioma, neuroblastoma);
(e) epithelial cancer or a minimal residual cancer;
(f) epithelial cancer; or
(g) bone or soft tissue cancer (e.g. Ewing sarcoma), breast, liver, lung, head and neck, colorectal, prostate, leiomyosarcoma, cervical and endometrial cancer, ovarian, prostate, and pancreatic cancer.

55-59. (canceled)
